(19) United States
(12) Patent Application Publication
(10) Pub. No.: US 2003/0022835 A1
(43) Pub. Date: Jan. 30, 2003

(54) Compositions isolated from skin cells and methods for their use

(75) Inventors: James D. Watson, Auckland (NZ); Lorna Strachan, Auckland (NZ); Matthew Sleeman, Weston Colville (GB); Rene Onrust, Mercer Is, WA (US); James G. Murison, Auckland (NZ); Krishanand D. Kumble, Los Altos, CA (US)

Correspondence Address: SPECKMAN LAW GROUP, 1501 WESTERN AVE, SUITE 100, SEATTLE, WA, 98101, US

(73) Assignee: Genesis Research and Development Corporation Limited, Auckland (NZ)

(21) Appl. No.: 10/152,661

(22) Filed: May 20, 2002

Related U.S. Application Data
(63) Continuation-in-part of application No. 09/866,050, filed on May 24, 2001.
Application No. 09/866,050 is a continuation-in-part of application No. 09/312,283, filed on May 14, 1999.
Application No. 09/312,283 is a continuation-in-part of application No. 09/188,930, filed on Nov. 9, 1998, now Pat. No. 6,150,502.
Application No. 09/188,930 is a continuation-in-part of application No. 09/069,726, filed on Apr. 29, 1998, now abandoned.
(60) Provisional application No. 60/206,650, filed on May 24, 2000.
(60) Provisional application No. 60/221,232, filed on Jul. 25, 2000.

(30) Foreign Application Priority Data
Apr. 29, 1999 (WO) PCT/NZ99/00051

(51) Int. Cl. A61K 38/17; C12P 21/02; C12N 5/06; C07H 21/04; C07K 14/435

(52) U.S. Cl. 514/12; 530/350; 536/23.5; 435/69.1; 435/320.1; 435/325

(57) ABSTRACT

Isolated polynucleotides encoding polypeptides expressed in mammalian skin cells are provided, together with expression vectors and host cells comprising such isolated polynucleotides. Methods for the use of such polynucleotides and polypeptides are also provided.

### REFERENCE TO RELATED APPLICATIONS

[0001] This application is a continuation-in-part of U.S. patent application Ser. No. 09/866,050, filed May 24, 2001, which is a continuation-in-part of U.S. application Ser. No. 09/312,283, filed May 14, 1999, which is a continuation-in-part of U.S. application Ser. No. 09/188,930, filed Nov. 9, 1998, now U.S. Pat. No. 6,150,502, which is a continuation-in-part of U.S. application Ser. No. 09/069,726, filed Apr. 29, 1998, now abandoned, and claims priority to International Patent Application No. PCT/NZ99/00051, filed Apr. 29, 1999, U.S. Provisional Application No. 60/206,650, filed May 24, 2000, and U.S. Provisional Application No. 60/221,232, filed Jul. 25, 2000.

### TECHNICAL FIELD OF THE INVENTION

[0002] This invention relates to polynucleotides and polypeptides expressed in skin cells, and various methods for treating a patient involving administration of a polypeptide or polynucleotide of the present invention.

### REFERENCE TO SEQUENCE LISTING SUBMITTED ON COMPACT DISC

[0003] This application incorporates by reference in its entirety the Sequence Listing contained in the accompanying two compact discs, one of which is a duplicate copy. Each CD contains the following file: 1011C5 SEQLIST.txt, having a date of creation of May 17, 2002.

### BACKGROUND OF THE INVENTION

[0004] The skin is the largest organ in the body and serves as a protective cover. The loss of skin, as occurs in a badly burned person, may lead to death owing to the absence of a barrier against infection by external microbial organisms, as well as loss of body temperature and body fluids.

[0005] Skin tissue is composed of several layers. The outermost layer is the epidermis which is supported by a basement membrane and overlies the dermis. Beneath the dermis is loose connective tissue and fascia which cover muscles or bony tissue. The skin is a self-renewing tissue in that cells are constantly being formed and shed. The deepest cells of the epidermis are the basal cells, which are enriched in cells capable of replication. Such replicating cells are called progenitor or stem cells. Replicating cells in turn give rise to daughter cells called ‘transit amplifying cells’. These cells undergo differentiation and maturation into keratinocytes (mature skin cells) as they move from the basal layer to the more superficial layers of the epidermis. In the process, keratinocytes become cornified and are ultimately shed from the skin surface. Other cells in the epidermis include melanocytes which synthesize melanin, the pigment responsible for protection against sunlight. The Langerhans cell also resides in the epidermis and functions as a cell which processes foreign proteins for presentation to the immune system.

[0006] The dermis contains nerves, blood and lymphatic vessels, fibrous and fatty tissue. Within the dermis are fibroblasts, macrophages and mast cells. Both the epidermis and dermis are penetrated by sweat, or sebaceous glands and hair follicles. Each strand of hair is derived from a hair follicle. When hair is plucked out, the hair re-grows from epithelial cells directed by the dermal papillae of the hair follicle.

[0007] When the skin surface is breached, for example in a wound, the stem cells proliferate and daughter keratinocytes migrate across the wound to reseal the tissues. The skin cells therefore possess genes activated in response to trauma. The products of these genes include several growth factors, such as epidermal growth factor, which mediate the proliferation of skin cells. The genes that are activated in the skin, and the protein products of such genes, may be developed as agents for the treatment of skin wounds. Additional growth factors derived from skin cells may also influence growth of other cell types. As skin cancers are a disorder of the growth of skin cells, proteins derived from skin that regulate cellular growth may be developed as agents for the treatment of skin cancers. Skin derived proteins that regulate the production of melanin may be useful as agents, which protect skin against unwanted effects of sunlight.

[0008] Keratinocytes are known to secrete cytokines and express various cell surface proteins. Cytokines and cell surface molecules are proteins, which play an important role in the inflammatory response against infection, and also in autoimmune diseases affecting the skin. Genes and their protein products that are expressed by skin cells may thus be developed into agents for the treatment of inflammatory disorders affecting the skin.

[0009] Hair is an important part of a person's individuality. Disorders of the skin may lead to hair loss. Alopecia areata is a disease characterized by the patchy loss of hair over the scalp. Total baldness is a side effect of drug treatment for cancer. The growth and development of hair is mediated by the effects of genes expressed in skin and dermal papillae. Such genes and their protein products may be usefully developed into agents for the treatment of disorders of the hair follicle.

[0010] New treatments are required to hasten the healing of skin wounds, to prevent the loss of hair, enhance the re-growth of hair or removal of hair, and to treat autoimmune and inflammatory skin diseases more effectively and without adverse effects. More effective treatments of skin cancers are also required. There thus remains a need in the art for the identification and isolation of genes encoding proteins expressed in the skin, for use in the development of therapeutic agents for the treatment of disorders including those associated with skin.

### SUMMARY OF THE INVENTION

[0011] The present invention provides polypeptides and functional portions of polypeptides, which may be expressed in skin cells, together with polynucleotides encoding such polypeptides or functional portions thereof, expression vectors and host cells comprising such polynucleotides, and methods for their use.

[0012] In specific embodiments, isolated polynucleotides are provided that comprise a polynucleotide selected from the group consisting of: (a) sequences recited in SEQ ID NOS: 1-119, 198-276, 349-372, 399-405, 410-412, 416, 418-455, 464, 466-487, 510, 511 and 514-623; (b) complements of the sequences recited in SEQ ID NOS: 1-119, 198-276, 349-372, 399-405, 410-412, 416, 418-455, 464, 466-487, 510, 511 and 514-623; (c) reverse complements of the sequences recited in SEQ ID NOS: 1-119, 198-276, 349-372, 399-405, 410-412, 416, 418-455, 464, 466-487, 510, 511 and 514-623; (d) reverse sequences of the sequences recited in SEQ ID NOS: 1-119, 198-276, 349-372, 399-405, 410-412, 416, 418-455, 464, 466-487, 510, 511 and 514-623; (e) sequences having a 99% probability of being the same as a sequence of (a)-(d); and (f) sequences having at least 75%, 90% or 95% identity to a sequence of (a)-(d).

[0013] In further embodiments, the present invention provides isolated polypeptides comprising an amino acid sequence selected from the group consisting of: (a) sequences provided in SEQ ID NOS: 120-197, 275-348, 373-398, 406-409, 413-415, 417, 456-463, 465, 488-509, 512, 513 and 624-725; and (b) sequences having at least 75%, 90% or 95% identity to a sequence provided in SEQ ID NOS: 120-197, 275-348, 373-398, 406-409, 413-415, 417, 456-463, 465, 488-509, 512, 513 and 624-725, together with isolated polynucleotides encoding such polypeptides. Isolated polypeptides which comprise at least a functional portion of an amino acid sequence selected from the group consisting of: (a) sequences provided in SEQ ID NOS: 120-197, 275-348, 373-398, 406-409, 413-415, 417, 456-463, 465, 488-509, 512, 513 and 624-725, and variants thereof, are also provided.

[0014] In another aspect, the present invention provides fusion proteins comprising at least one polypeptide of the present invention.

[0015] In related embodiments, the present invention provides expression vectors comprising the above polynucleotides, together with host cells transformed with such vectors.

[0016] As detailed below, the isolated polynucleotides and polypeptides of the present invention may be usefully employed in the preparation of therapeutic agents for the treatment of disorders such as skin wounds, cancers, growth and developmental defects, and inflammatory diseases. The present invention thus further provides compositions comprising an inventive polypeptide, fusion protein, or polynucleotide encoding such a polypeptide, together with at least one component selected from the group consisting of: physiologically acceptable carriers and immunostimulants.

[0017] In further aspects, the present invention provides methods for the treatment of a disorder in a subject, together with methods for modulating skin inflammation, stimulating epithelial cell growth, stimulating keratinocyte growth and motility, inhibiting the growth of epithelial-derived cancer cells, inhibiting angiogenesis and vascularization of tumors, modulating the growth of blood vessels, inhibiting the binding of HIV-1 to leukocytes, treatment of an inflammatory disease or for the treatment of cancer in a subject in a subject, comprising administering to the subject a composition described herein.

[0018] In yet a further aspect, methods for the treatment of a disorder by reducing the effective amount, inactivating, and/or inhibiting the activity of an inventive polypeptide or a polynucleotide that encodes such a polypeptide are provided.

[0019] The above-mentioned and additional features of the present invention, together with the manner of obtaining them, will be best understood by reference to the following more detailed description. All references disclosed herein are incorporated herein by reference in their entirety as if each was incorporated individually.

### BRIEF DESCRIPTION OF THE DRAWINGS

[0020] FIG. 1 shows the results of a Northern analysis of the distribution of huTR1 mRNA in human tissues. Key: He, Heart; Br, Brain; Pl, Placenta; Lu, Lung; Li, Liver; SM, Skeletal muscle; Ki, Kidney; Sp, Spleen; Th, Thymus; Pr, Prostate; Ov, Ovary.

[0021] FIG. 2 shows the results of a MAP kinase assay of muTR1a and huTR1a. MuTR1a (500 ng/ml), huTR1a (100 ng/ml) or LPS (3 pg/ml) were added as described in the text.

[0022] FIG. 3 shows the stimulation of growth of neonatal foreskin keratinocytes by muTR1a.

[0023] FIG. 4 shows the stimulation of growth of the transformed human keratinocyte cell line HaCaT by muTR1a and huTR1a.

[0024] FIG. 5 shows the inhibition of growth of the human epidermal carcinoma cell line A431 by muTR1 a and huTR1a.

[0025] FIG. 6 shows the inhibition of IL-2 induced growth of concanavalin A-stimulated murine splenocytes by KS2a.

[0026] FIG. 7 shows the stimulation of growth of rat intestinal epithelial cells (IEC-18) by a combination of KS3a plus apo-transferrin.

[0027] FIG. 8 illustrates the oxidative burst effect of TR-1 (100 ng/ml), muKS1 (100 ng/ml), SDF1α (100 ng/ml), and fMLP (10 μM) on human PBMC.

[0028] FIG. 9 shows the chemotactic effect of muKS1 and SDF-1α on THP-1 cells.

[0029] FIG. 10 shows the induction of cellular infiltrate in C3H/HeJ mice after intraperitoneal injections with muKS1 (50 μg), GV14B (50 μg) and PBS.

[0030] FIG. 11 demonstrates the induction of phosphorylation of ERK1 and ERK2 in CV1/EBNA and HeLa cell lines by huTR1a.

[0031] FIG. 12 shows the huTR1mRNA expression in HeLa cells after stimulation by muTR1, huTR1, huTGFα and PBS (100 ng/ml each).

[0032] FIG. 13 shows activation of the SRE by muTR1a in PC-12 (FIG. 13A) and HaCaT (FIG. 13B) cells.

[0033] FIG. 14 shows the inhibition of huTR1a mediated growth on HaCaT cells by an antibody to the EGF receptor.

[0034] FIG. 15A shows the nucleotide sequence of KS1 cDNA (SEQ ID NO: 464) along with the deduced amino acid sequence (SEQ ID NO: 465) using single letter code. The 5′ UTR is indicated by negative numbers. The underlined NH₂-terminal amino acids represent the predicted leader sequence and the stop codon is denoted by ***. The poly-adenylation signal is marked by a double underline. FIG. 15B shows a comparison of the complete open reading frame of KS1 (referred to in FIG. 15B as KLF-1) with its human homologue BRAK and with the mouse α-chemokines mCrg-2, mMig, mSDF-1, mBLC, mMIP2, mKC and mLIX. An additional five residues are present in KS1 and BRAK between cysteine 3 and cysteine 4 that have not previously been described for chemokines.

### DETAILED DESCRIPTION OF THE INVENTION

[0035] In one aspect, the present invention provides polynucleotides that were isolated from mammalian skin cells. The term “polynucleotide(s),” as used herein, means a single or double-stranded polymer of deoxyribonucleotide or ribonucleotide bases and includes DNA and corresponding RNA molecules, including HnRNA and mRNA molecules, both sense and anti-sense strands, and comprehends cDNA, genomic DNA and recombinant DNA, as well as wholly or partially synthesized polynucleotides. An HnRNA molecule contains introns and corresponds to a DNA molecule in a generally one-to-one manner. An mRNA molecule corresponds to an HnRNA and DNA molecule from which the introns have been excised. A polynucleotide may consist of an entire gene, or any portion thereof. Operable anti-sense polynucleotides may comprise a fragment of the corresponding polynucleotide, and the definition of “polynucleotide” therefore includes all such operable anti-sense fragments. Anti-sense polynucleotides and techniques involving anti-sense polynucleotides are well known in the art and are described, for example, in Robinson-Benion et al., Methods in Enzymol. 254: 363-375, 1995 and Kawasaki et al., Artific. Organs 20: 836-848, 1996.

[0036] Identification of genomic DNA and heterologous species DNAs can be accomplished by standard DNA/DNA hybridization techniques, under appropriately stringent conditions, using all or part of a cDNA sequence as a probe to screen an appropriate library. Alternatively, PCR techniques using oligonucleotide primers that are designed based on known genomic DNA, cDNA and protein sequences can be used to amplify and identify genomic and cDNA sequences. Synthetic DNAs corresponding to the identified sequences and variants may be produced by conventional synthesis methods. All the polynucleotides provided by the present invention are isolated and purified, as those terms are commonly used in the art.

[0037] In specific embodiments, the polynucleotides of the present invention comprise a sequence selected from the group consisting of sequences provided in SEQ ID NOS: 1-119, 198-274, 349-372, 399-405, 410-412, 416, 418-455, 464, 466-487, 510, 511 and 514-623, and variants thereof. Complements of such isolated polynucleotides, reverse complements of such isolated polynucleotides and reverse sequences of such isolated polynucleotides are also provided, together with polynucleotides comprising at least a specified number of contiguous residues (x-mers) of any of the above-mentioned polynucleotides, extended sequences corresponding to any of the above polynucleotides, antisense sequences corresponding to any of the above polynucleotides, and variants of any of the above polynucleotides, as that term is described in this specification.

[0038] The definition of the terms “complement,” “reverse complement,” and “reverse sequence,” as used herein, is best illustrated by the following example. For the sequence 5′ AGGACC 3′, the complement, reverse complement, and reverse sequence are as follows:

| | |
|---|---|
| complement | 3′ TCCTGG 5′ |
| reverse complement | 3′ GGTCCT 5′ |
| reverse sequence | 5′ CCAGGA 3′. |

[0039] Preferably, sequences that are complements of a specifically recited polynucleotide sequence are complementary over the entire length of the specific polynucleotide sequence.

[0040] Some of the polynucleotides disclosed herein are “partial” sequences, in that they do not represent a full length gene encoding a full length polypeptide. Such partial sequences may be extended by analyzing and sequencing various DNA libraries using primers and/or probes and well known hybridization and/or PCR techniques. Partial sequences may be extended until an open reading frame encoding a polypeptide, a full length polynucleotide and/or gene capable of expressing a polypeptide, or another useful portion of the genome is identified. Such extended sequences, including full length polynucleotides and genes, are described as “corresponding to” a sequence identified as one of the sequences of SEQ ID NO: 1-119, 198-274, 349-372, 399-405, 410-412, 416, 418-455, 464, 466-487, 510, 511 and 514-623, or a variant thereof, or a portion of one of the sequences of SEQ ID NO: 1-119, 198-274, 349-372, 399-405, 410-412, 416, 418-455, 464, 466-487, 510, 511 and 514-623, or a variant thereof, when the extended polynucleotide comprises an identified sequence or its variant, or an identified contiguous portion (x-mer) of one of the sequences of SEQ ID NO: 1-119, 198-274, 349-372, 399-405, 410-412, 416, 418-455, 464, 466-487, 510, 511 and 514-623, or a variant thereof. Such extended polynucleotides may have a length of from about 50 to about 4,000 nucleic acids or base pairs, and preferably have a length of less than about 4,000 nucleic acids or base pairs, more preferably yet a length of less than about 3,000 nucleic acids or base pairs, more preferably yet a length of less than about 2,000 nucleic acids or base pairs. Under some circumstances, extended polynucleotides of the present invention may have a length of less than about 1,800 nucleic acids or base pairs, preferably less than about 1,600 nucleic acids or base pairs, more preferably less than about 1,400 nucleic acids or base pairs, more preferably yet less than about 1,200 nucleic acids or base pairs, and most preferably less than about 1,000 nucleic acids or base pairs.

[0041] Similarly, RNA sequences, reverse sequences, complementary sequences, antisense sequences, and the like, corresponding to the polynucleotides of the present invention, may be routinely ascertained and obtained using the cDNA sequences identified as SEQ ID NO: 1-119, 198-274, 349-372, 399-405, 410-412, 416, 418-455, 464, 466-487, 510, 511 and 514-623.

[0042] The polynucleotides identified as SEQ ID NO: 1-119, 198-274, 349-372, 399-405, 410-412, 416, 418-455, 464, 466-487, 510, 511 and 514-623 contain open reading frames (“ORFs”), or partial open reading frames, encoding polypeptides or functional portions of polypeptides. Open reading frames may be identified using techniques that are well known in the art. These techniques include, for example, analysis for the location of known start and stop codons, most likely reading frame identification based on codon frequencies, etc. Open reading frames and portions of open reading frames may be identified in the polynucleotides of the present invention. Suitable tools and software for ORF analysis are well known in the art and include, for example, GeneWise, available from The Sanger Center, Wellcome Trust Genome Campus, Hinxton, Cambridge, CB10 1SA, United Kingdom; Diogenes, available from Computational Biology Centers, University of Minnesota, Academic Health Center, UMHG Box 43 Minneapolis Minn. 55455; and GRAIL, available from the Informatics Group, Oak Ridge National Laboratories, Oak Ridge, Tenn. TN. Once a partial open reading frame is identified, the polynucleotide may be extended in the area of the partial open reading frame using techniques that are well known in the art until the polynucleotide for the full open reading frame is identified. Thus, open reading frames encoding polypeptides and/or functional portions of polypeptides may be identified using the polynucleotides of the present invention.

[0043] Once open reading frames are identified in the polynucleotides of the present invention, the open reading frames may be isolated and/or synthesized. Expressible genetic constructs comprising the open reading frames and suitable promoters, initiators, terminators, etc., which are well known in the art, may then be constructed. Such genetic constructs may be introduced into a host cell to express the polypeptide encoded by the open reading frame. Suitable host cells may include various prokaryotic and eukaryotic cells, including plant cells, mammalian cells, bacterial cells, algae and the like.

[0044] In another aspect, the present invention provides isolated polypeptides encoded, or partially encoded, by the above polynucleotides. The term “polypeptide”, as used herein, encompasses amino acid chains of any length including full length proteins, wherein amino acid residues are linked by covalent peptide bonds. Polypeptides of the present invention may be naturally purified products, or may be produced partially or wholly using recombinant techniques. Polypeptides may comprise a signal (or leader) sequence at the N-terminal end of the protein, which co-translationally or post-translationally directs transfer of the protein. The polypeptide may also be conjugated to a linker or other sequence for ease of synthesis, purification or identification of the polypeptide (e.g., poly-His), or to enhance binding of the polypeptide to a solid support. For example, a polypeptide may be conjugated to an immunoglobulin Fc region.

[0045] The term “polypeptide encoded by a polynucleotide” as used herein, includes polypeptides encoded by a nucleotide sequence which includes a partial isolated DNA sequence of the present invention. In specific embodiments, the inventive polypeptides comprise an amino acid sequence selected from the group consisting of sequences provided in SEQ ID NOS: 120-197, 275-348, 373-398, 406-409, 413-415, 417, 456-463, 465, 488-509, 512, 513 and 624-725, as well as variants of such sequences.

[0046] Polypeptides of the present invention may be produced recombinantly by inserting a DNA sequence that encodes the polypeptide into an expression vector and expressing the polypeptide in an appropriate host. Any of a variety of expression vectors known to those of ordinary skill in the art may be employed. Expression may be achieved in any appropriate host cell that has been transformed or transfected with an expression vector containing a DNA molecule that encodes a recombinant polypeptide. Suitable host cells include prokaryotes, yeast, and higher eukaryotic cells. Preferably, the host cells employed are E. coli, insect, yeast, or a mammalian cell line such as COS or CHO. The DNA sequences expressed in this manner may encode naturally occurring polypeptides, portions of naturally occurring polypeptides, or other variants thereof.

[0047] In a related aspect, polypeptides are provided that comprise at least a functional portion of a polypeptide having an amino acid sequence selected from the group consisting of sequences provided in SEQ ID NOS: 120-197, 275-348, 373-398, 406-409, 413-415, 417, 456-463, 465, 488-509, 512-513 and 624-725, and variants thereof. As used herein, the “functional portion” of a polypeptide is that portion which contains the active site essential for affecting the function of the polypeptide, for example, the portion of the molecule that is capable of binding one or more reactants. The active site may be made up of separate portions present on one or more polypeptide chains and will generally exhibit high binding affinity. Such functional portions generally comprise at least about 5 amino acid residues, more preferably at least about 10, and most preferably at least about 20 amino acid residues.

[0048] Functional portions of a polypeptide may be identified by first preparing fragments of the polypeptide by either chemical or enzymatic digestion of the polypeptide, or by mutation analysis of the polynucleotide that encodes the polypeptide and subsequent expression of the resulting mutant polypeptides. The polypeptide fragments or mutant polypeptides are then tested to determine which portions retain biological activity, using, for example, the representative assays provided below.

[0049] Portions and other variants of the inventive polypeptides may be generated by synthetic or recombinant means. Synthetic polypeptides having fewer than about 100 amino acids, and generally fewer than about 50 amino acids, may be generated using techniques well known to those of ordinary skill in the art. For example, such polypeptides may be synthesized using any of the commercially available solid-phase techniques, such as the Merrifield solid-phase synthesis method, where amino acids are sequentially added to a growing amino acid chain. See Merrifield, J. Am. Chem. Soc. 85:2149-2146, 1963. Equipment for automated synthesis of polypeptides is commercially available from suppliers such as Perkin Elmer/Applied BioSystems, Inc. (Foster City, Calif.), and may be operated according to the manufacturer's instructions. Variants of a native polypeptide may be prepared using standard mutagenesis techniques, such as oligonucleotide-directed site-specific mutagenesis (Kunkel, T., Proc. Natl. Acad. Sci. USA 82:488-492, 1985). Sections of DNA sequence may also be removed using standard techniques to permit preparation of truncated polypeptides.

[0050] In general, the polypeptides disclosed herein are prepared in an isolated, substantially pure, form. Preferably, the polypeptides are at least about 80% pure, more preferably at least about 90% pure, and most preferably at least about 99% pure. In certain preferred embodiments, described in detail below, the isolated polypeptides are incorporated into compositions for use in the treatment of disorders, such as skin wounds, cancers, growth and developmental defects, and inflammatory diseases.

[0051] As used herein, the term “variant” comprehends nucleotide or amino acid sequences different from the specifically identified sequences, wherein one or more nucleotides or amino acid residues is deleted, substituted, or added. Variants may be naturally occurring allelic variants, or non-naturally occurring variants. Variant sequences (polynucleotide or polypeptide) preferably exhibit at least 75%, more preferably at least 80%, more preferably yet at least 90%, and most preferably, at least 95% or 98% identity to a sequence of the present invention. The percentage identity may be determined using well known techniques. In one embodiment, the percentage identity is determined by aligning the two sequences to be compared as described below, determining the number of identical residues in the aligned portion, dividing that number by the total number of residues in the inventive (queried) sequence, and multiplying the result by 100.

[0052] Polynucleotides and polypeptides having a specified percentage identity to a polynucleotide or polypeptide identified in one of SEQ ID NO: 1-725 thus share a high degree of similarity in their primary structure. In addition to a specified percentage identity to a polynucleotide of the present invention, variant polynucleotides and polypeptides preferably have additional structural and/or functional features in common with a polynucleotide of the present invention. Polynucleotides having a specified degree of identity to, or capable of hybridizing to, a polynucleotide of the present invention preferably additionally have at least one of the following features: (1) they contain an open reading frame, or partial open reading frame, encoding a polypeptide, or a functional portion of a polypeptide, having substantially the same functional properties as the polypeptide, or functional portion thereof, encoded by a polynucleotide in a recited SEQ ID NO.; or (2) they contain identifiable domains in common.

[0053] Polynucleotide or polypeptide sequences may be aligned, and percentages of identical nucleotides or amino acids in a specified region may be determined against another polynucleotide or polypeptide, using computer algorithms that are publicly available. The BLASTN and FASTA algorithms, set to the default parameters described in the documentation and distributed with the algorithm, may be used for aligning and identifying the similarity of polynucleotide sequences. The alignment and similarity of polypeptide sequences may be examined using the BLASTP algorithm. BLASTX and FASTX algorithms compare nucleotide query sequences translated in all reading frames against polypeptide sequences. The FASTA and FASTX algorithms are described in Pearson and Lipman, Proc. Natl. Acad. Sci. USA 85:2444-2448, 1988; and in Pearson, Methods in Enzymol. 183:63-98, 1990. The FASTA software package is available from the University of Virginia by contacting the Assistant Provost for Research, University of Virginia, PO Box 9025, Charlottesville, Va. 22906-9025. The BLASTN software is available from the National Center for Biotechnology Information (NCBI), National Library of Medicine, Building 38A, Room 8N805, Bethesda, Md. 20894. The BLASTN algorithm Version 2.0.11 [Jan. 20, 2000] set to the default parameters described in the documentation and distributed with the algorithm, is preferred for use in the determination of polynucleotide variants according to the present invention. The use of the BLAST family of algorithms, including BLASTN, BLASTP and BLASTX, is described in the publication of Altschul et al., “Gapped BLAST and PSI-BLAST: a new generation of protein database search programs,” Nucleic Acids Res. 25:3389-3402, 1997.

[0054] The following running parameters are preferred for determination of alignments and similarities using BLASTN that contribute to the E values and percentage identity for polynucleotides: Unix running command with the following default parameters: blastall-p blastn-d embldb-e 10-G 0-E 0-r 1-v 30-b 30-i queryseq-o results; and parameters are: -p Program Name [String]; -d Database [String]; -e Expectation value (E) [Real]; -G Cost to open a gap (zero invokes default behavior) [Integer]; -E Cost to extend a gap (zero invokes default behavior) [Integer]; -r Reward for a nucleotide match (BLASTN only) [Integer]; -v Number of one-line descriptions (V) [Integer]; -b Number of alignments to show (B) [Integer]; -i Query File [File In]; -o BLAST report Output File [File Out] Optional.

[0055] The following running parameters are preferred for determination of alignments and similarities using BLASTP that contribute to the E values and percentage identity of polypeptide sequences: blastall-p blastp-d swissprotdb-e 10-G 0-E 0-v 30-b 30-i queryseq-o results; the parameters are: -p Program Name [String]; -d Database [String]; -e Expectation value (E) [Real]; -G Cost to open a gap (zero invokes default behavior) [Integer]; -E Cost to extend a gap (zero invokes default behavior) [Integer]; -v Number of one-line descriptions (v) [Integer]; -b Number of alignments to show (b) [Integer]; -I Query File [File In]; -o BLAST report Output File [File Out] Optional.

[0056] The “hits” to one or more database sequences by a queried sequence produced by BLASTN, BLASTP, FASTA, or a similar algorithm, align and identify similar portions of sequences. The hits are arranged in order of the degree of similarity and the length of sequence overlap. Hits to a database sequence generally represent an overlap over only a fraction of the sequence length of the queried sequence.

[0057] As noted above, the percentage identity of a polynucleotide or polypeptide sequence is determined by aligning polynucleotide and polypeptide sequences using appropriate algorithms, such as BLASTN or BLASTP, respectively, set to default parameters; identifying the number of identical nucleic or amino acids over the aligned portions; dividing the number of identical nucleic or amino acids by the total number of nucleic or amino acids of the polynucleotide or polypeptide of the present invention; and then multiplying by 100 to determine the percentage identity. By way of example, a queried polynucleotide having 220 nucleic acids has a hit to a polynucleotide sequence in the EMBL database having 520 nucleic acids over a stretch of 23 nucleotides in the alignment produced by the BLASTN algorithm using the default parameters. The 23-nucleotide hit includes 21 identical nucleotides, one gap and one different nucleotide. The percentage identity of the queried polynucleotide to the hit in the EMBL database is thus 21/220 times 100, or 9.5%. The percentage identity of polypeptide sequences may be determined in a similar fashion.

[0058] The BLASTN and BLASTX algorithms also produce “Expect” values for polynucleotide and polypeptide alignments. The Expect value (E) indicates the number of hits one can “expect” to see over a certain number of contiguous sequences by chance when searching a database of a certain size. The Expect value is used as a significance threshold for determining whether the hit to a database indicates true similarity. For example, an E value of 0.1 assigned to a polynucleotide hit is interpreted as meaning that in a database of the size of the EMBL database, one might expect to see 0.1 matches over the aligned portion of the sequence with a similar score simply by chance. By this criterion, the aligned and matched portions of the sequences then have a probability of 90% of being related. For sequences having an E value of 0.01 or less over aligned and matched portions, the probability of finding a match by chance in the EMBL database is 1% or less using the BLASTN algorithm. E values for polypeptide sequences may be determined in a similar fashion using various polypeptide databases, such as the SwissProt database.

[0059] According to one embodiment, “variant” polynucleotides and polypeptides, with reference to each of the polynucleotides and polypeptides of the present invention, preferably comprise sequences having the same number or fewer nucleotides or amino acids than each of the polynucleotides or polypeptides of the present invention and producing an E value of 0.01 or less when compared to the polynucleotide or polypeptide of the present invention. That is, a variant polynucleotide or polypeptide is any sequence that has at least a 99% probability of being related to the polynucleotide or polypeptide of the present invention, measured as having an E value of 0.01 or less using the BLASTN or BLASTX algorithms set at the default parameters. According to a preferred embodiment, a variant polynucleotide is a sequence having the same number or fewer nucleic acids than a polynucleotide of the present invention that has at least a 99% probability of being related to the polynucleotide of the present invention, measured as having an E value of 0.01 or less using the BLASTN algorithm set at the default parameters. Similarly, according to a preferred embodiment, a variant polypeptide is a sequence having the same number or fewer amino acids than a polypeptide of the present invention that has at least a 99% probability of being related as the polypeptide of the present invention, measured as having an E value of 0.01 or less using the BLASTP algorithm set at the default parameters.

[0060] In an alternative embodiment, variant polynucleotides are sequences that hybridize to a polynucleotide of the present invention under stringent conditions. Stringent hybridization conditions for determining complementarity include salt conditions of less than about 1 M, more usually less than about 500 mM, and preferably less than about 200 mM. Hybridization temperatures can be as low as 5° C., but are generally greater than about 22° C., more preferably greater than about 30° C., and most preferably greater than about 37° C. Longer DNA fragments may require higher hybridization temperatures for specific hybridization. Since the stringency of hybridization may be affected by other factors such as probe composition, presence of organic solvents, and extent of base mismatching, the combination of parameters is more important than the absolute measure of any one alone. An example of “stringent conditions” is prewashing in a solution of 6×SSC, 0.2% SDS; hybridizing at 65° C., 6×SSC, 0.2% SDS overnight; followed by two washes of 30 minutes each in 1×SSC, 0.1% SDS at 65° C. and two washes of 30 minutes each in 0.2×SSC, 0.1% SDS at 65° C.

[0061] The present invention also encompasses polynucleotides that differ from the disclosed sequences but that, as a consequence of the discrepancy of the genetic code, encode a polypeptide having similar enzymatic activity to a polypeptide encoded by a polynucleotide of the present invention. Thus, polynucleotides comprising sequences that differ from the polynucleotide sequences recited in SEQ ID NO: 1-119, 198-276, 349-372, 399-405, 410-412, 416, 418-455, 464, 466-487, 510, 511 and 514-623, or complements, reverse sequences, or reverse complements of those sequences, as a result of conservative substitutions are contemplated by and encompassed within the present invention. Additionally, polynucleotides comprising sequences that differ from the polynucleotide sequences recited in SEQ ID NO: 1-119, 198-276, 349-372, 399-405, 410-412, 416, 418-455, 464, 466-487, 510, 511 and 514-623, or complements, reverse complements or reverse sequences thereof, as a result of deletions and/or insertions totaling less than 10% of the total sequence length are also contemplated by and encompassed within the present invention. Similarly, polypeptides comprising sequences that differ from the polypeptide sequences recited in SEQ ID NO: 120-197, 275-348, 373-398, 406-409, 413-415, 417, 456-463, 465, 488-509, 512, 513 and 624-725 as a result of amino acid substitutions, insertions, and/or deletions totaling less than 10% of the total sequence length are contemplated by and encompassed within the present invention, provided the variant polypeptide has functional properties which are substantially the same as, or substantially similar to those of a polypeptide comprising a sequence of SEQ ID NO: 120-197, 275-348, 373-398, 406-409, 413-415, 417, 456-463, 465, 488-509, 512, 513 and 624-725.

[0062] As used herein, the term “x-mer,” with reference to a specific value of “x,” refers to a polynucleotide or polypeptide, respectively, comprising at least a specified number (“x”) of contiguous residues of: any of the polynucleotides provided in SEQ ID NO: 1-119, 198-274, 349-372, 399-405, 410-412, 416, 418-455, 464, 466-487, 510, 511 and 514-623; or any of the polypeptides set out in SEQ ID NO: 120-197, 275-348, 373-398, 406-409, 413-415, 417, 456-463, 465, 488-509, 512, 513 and 624-725. The value of x may be from about 20 to about 600, depending upon the specific sequence.

[0063] Polynucleotides of the present invention comprehend polynucleotides comprising at least a specified number of contiguous residues (x-mers) of any of the polynucleotides identified as SEQ ID NO: 1-119, 198-274, 349-372, 399-405, 410-412, 416, 418-455, 464, 466-487, 510, 511 and 514-623, or their variants. Polypeptides of the present invention comprehend polypeptides comprising at least a specified number of contiguous residues (x-mers) of any of the polypeptides identified as SEQ ID NO: 120-197, 275-348, 373-398, 406-409, 413-415, 417, 456-463, 465, 488-509, 512, 513 and 624-725. According to preferred embodiments, the value of x is at least 20, more preferably at least 40, more preferably yet at least 60, and most preferably at least 80. Thus, polynucleotides of the present invention include polynucleotides comprising a 20-mer, a 40-mer, a 60-mer, an 80-mer, a 100-mer, a 120-mer, a 150-mer, a 180-mer, a 220-mer, a 250-mer; or a 300-mer, 400-mer, 500-mer or 600-mer of a polynucleotide provided in SEQ ID NOS: 1-119, 198-274, 349-372, 399-405, 410-412, 416, 418-455, 464, 466-487, 510, 511 and 514-623, or of a variant of one of the polynucleotides provided in SEQ ID NO: 1-119, 198-274, 349-372, 399-405, 410-412, 416, 418-455, 464, 466-487, 510, 511 and 514-623. Polypeptides of the present invention include polypeptides comprising a 20-mer, a 40-mer, a 60-mer, an 80-mer, a 100-mer, a 120-mer, a 150-mer, a 180-mer, a 220-mer, a 250-mer; or a 300-mer, 400-mer, 500-mer or 600-mer of a polypeptide provided in SEQ ID NOS: 120-197, 275-348, 373-398, 406-409, 413-415, 417, 456-463, 465, 488-509, 512, 513 and 624-725, or of a variant of one of the polypeptides provided in SEQ ID NOS: 120-197, 275-348, 373-398, 406-409, 413-415, 417, 456-463, 465, 488-509, 512, 513 and 624-725.

[0064] The inventive polynucleotides may be isolated by high throughput sequencing of cDNA libraries prepared from mammalian skin cells as described below in Example 1. Alternatively, oligonucleotide probes based on the sequences provided in SEQ ID NOS: 1-119, 198-274, 349-372, 399-405, 410-412, 416, 418-455, 464, 466-487, 510, 511 and 514-623 can be synthesized and used to identify positive clones in either cDNA or genomic DNA libraries from mammalian skin cells by means of hybridization or polymerase chain reaction (PCR) techniques. Probes can be shorter than the sequences provided herein but should be at least about 10, preferably at least about 15 and most preferably at least about 20 nucleotides in length. Hybridization and PCR techniques suitable for use with such oligonucleotide probes are well known in the art (see, for example, Mullis, et al., Cold Spring Harbor Symp. Quant. Biol., 51:263, 1987; Erlich, ed., PCR Technology, Stockton Press: NY, 1989; (Sambrook, J, Fritsch, E F and Maniatis, T, eds., Molecular Cloning: A Laboratory Manual, 2nd ed., Cold Spring Harbor Laboratory Press, Cold Spring Harbor, N.Y., 1989). Positive clones may be analyzed by restriction enzyme digestion, DNA sequencing or the like.

[0065] In addition, DNA sequences of the present invention may be generated by synthetic means using techniques well known in the art. Equipment for automated synthesis of oligonucleotides is commercially available from suppliers such as Perkin Elmer/Applied Biosystems Division (Foster City, Calif.) and may be operated according to the manufacturer's instructions.

[0066] The present invention also provides fusion proteins comprising a first and a second inventive polypeptide or, alternatively, a polypeptide of the present invention and a known polypeptide, together with variants of such fusion proteins. The fusion proteins of the present invention may include a linker peptide between the first and second polypeptides.

[0067] A polynucleotide encoding a fusion protein of the present invention is constructed using known recombinant DNA techniques to assemble separate polynucleotides encoding the first and second polypeptides into an appropriate expression vector. The 3′ end of a polynucleotide encoding the first polypeptide is ligated, with or without a peptide linker, to the 5′ end of a DNA sequence polynucleotide encoding the second polypeptide so that the reading frames of the sequences are in phase to permit mRNA translation of the two polynucleotides into a single fusion protein that retains the biological activity of both the first and the second polypeptides.

[0068] A peptide linker sequence may be employed to separate the first and the second polypeptides by a distance sufficient to ensure that each polypeptide folds into its secondary and tertiary structures. Such a peptide linker sequence is incorporated into the fusion protein using standard techniques well known in the art. Suitable peptide linker sequences may be chosen based on the following factors: (1) their ability to adopt a flexible extended conformation; (2) their inability to adopt a secondary structure that could interact with functional epitopes on the first and second polypeptides; and (3) the lack of hydrophobic or charged residues that might react with the polypeptide functional epitopes. Preferred peptide linker sequences contain Gly, Asn and Ser residues. Other near neutral amino acids, such as Thr and Ala may also be used in the linker sequence. Amino acid sequences which may be usefully employed as linkers include those disclosed in Maratea et al., Gene 40:39-46, 1985; Murphy et al., Proc. Natl. Acad. Sci. USA 83:8258-8262, 1986; U.S. Pat. No. 4,935,233 and U.S. Pat. No. 4,751,180. The linker sequence may be from 1 to about 50 amino acids in length. Peptide linker sequences are not required when the first and second polypeptides have non-essential N-terminal amino acid regions that can be used to separate the functional domains and prevent steric interference.

[0069] The ligated polynucleotides encoding the fusion proteins are cloned into suitable expression systems using techniques known to those of ordinary skill in the art.

[0070] Since the polynucleotide sequences of the present invention have been derived from skin, they likely encode proteins that have important roles in growth and development of skin, and in responses of skin to tissue injury and inflammation as well as disease states. Some of the polynucleotides contain sequences that code for signal sequences, or transmembrane domains, which identify the protein products as secreted molecules or receptors. Such protein products are likely to be growth factors, cytokines, or their cognate receptors. Several of the polypeptide sequences have more than 25% similarity to known biologically important proteins and thus are likely to represent proteins having similar biological functions.

[0071] In particular, the inventive polypeptides have important roles in processes such as: induction of hair growth; differentiation of skin stem cells into specialized cell types; cell migration; cell proliferation and cell-cell interaction. The polypeptides are important in the maintenance of tissue integrity, and thus are important in processes such as wound healing. Some of the disclosed polypeptides act as modulators of immune responses, especially since immune cells are known to infiltrate skin during tissue insult causing growth and differentiation of skin cells. In addition, many polypeptides are immunologically active, making them important therapeutic targets in a whole range of disease states not only within skin, but also in other tissues of the body. Antibodies to the polypeptides of the present invention and small molecule inhibitors related to the polypeptides of the present invention may also be used for modulating immune responses and for treatment of diseases according to the present invention.

[0072] In one aspect, the present invention provides methods for using one or more of the inventive polypeptides, fusion proteins or polynucleotides to treat disorders in a patient. As used herein, a “patient” refers to any warm-blooded animal, preferably a human.

[0073] In this aspect, the polypeptide, fusion protein or polynucleotide is generally present within a pharmaceutical or immunogenic composition. Pharmaceutical compositions may comprise one or more polypeptides, each of which may contain one or more of the above sequences (or variants thereof), and a physiologically acceptable carrier. Immunogenic compositions may comprise one or more of the above polypeptides and an immunostimulant, such as an adjuvant or a liposome, into which the polypeptide is incorporated.

[0074] Alternatively, a composition of the present invention may contain DNA encoding one or more polypeptides or fusion proteins as described above, such that the polypeptide or fusion protein is generated in situ. In such compositions, the DNA may be present within any of a variety of delivery systems known to those of ordinary skill in the art, including nucleic acid expression systems, and bacterial and viral expression systems. Appropriate nucleic acid expression systems contain the necessary DNA sequences for expression in the patient (such as a suitable promoter and terminator signal). Bacterial delivery systems involve the administration of a bacterium (such as Bacillus-Calmette-Guerin) that expresses an immunogenic portion of the polypeptide on its cell surface. In a preferred embodiment, the DNA may be introduced using a viral expression system (e.g., vaccinia or other poxvirus, retrovirus, or adenovirus), which may involve the use of a non-pathogenic, or defective, replication competent virus. Techniques for incorporating DNA into such expression systems are well known in the art. The DNA may also be “naked,” as described, for example, in Ulmer et al., Science 259:1745-1749, 1993 and reviewed by Cohen, Science 259:1691-1692, 1993. The uptake of naked DNA may be increased by coating the DNA onto biodegradable beads, which are efficiently transported into the cells.

[0075] Routes and frequency of administration, as well as dosage, vary from individual to individual. In general, the inventive compositions may be administered by injection (e.g., intradermal, intramuscular, intravenous, or subcutaneous), intranasally (e.g., by aspiration) or orally. In general, the amount of polypeptide present in a dose (or produced in situ by the DNA in a dose) ranges from about 1 pg to about 100 mg per kg of host, typically from about 10 pg to about 1 mg per kg of host, and preferably from about 100 pg to about 1 μg per kg of host. Suitable dose sizes will vary with the size of the patient, but will typically range from about 0.1 ml to about 5 ml.

[0076] While any suitable carrier known to those of ordinary skill in the art may be employed in the compositions of this invention, the type of carrier will vary depending on the mode of administration. For parenteral administration, such as subcutaneous injection, the carrier preferably comprises water, saline, alcohol, a lipid, a wax, or a buffer. For oral administration, any of the above carriers or a solid carrier, such as mannitol, lactose, starch, magnesium stearate, sodium saccharine, talcum, cellulose, glucose, sucrose, and magnesium carbonate, may be employed. Biodegradable microspheres (e.g., polylactic galactide) may also be employed as carriers for the pharmaceutical compositions of this invention. Suitable biodegradable microspheres are disclosed, for example, in U.S. Pat. Nos. 4,897,268 and 5,075,109.

[0077] Any of a variety of adjuvants may be employed in the immunogenic compositions of the invention to non-specifically enhance the immune response. Most adjuvants contain a substance designed to protect the antigen from rapid catabolism, such as aluminum hydroxide or mineral oil, and a non-specific stimulator of immune responses, such as lipid A, Bordetella pertussis, or Mycobacterium tuberculosis. Suitable adjuvants are commercially available as, for example, Freund's Incomplete Adjuvant and Freund's Complete Adjuvant (Difco Laboratories, Detroit, Mich.), and Merck Adjuvant 65 (Merck and Company, Inc., Rahway, N.J.). Other suitable adjuvants include alum, biodegradable microspheres, monophosphoryl lipid A, and Quil A.

[0078] The polynucleotides of the present invention may also be used as markers for tissue, as chromosome markers or tags, in the identification of genetic disorders, and for the design of oligonucleotides for examination of expression patterns using techniques well known in the art, such as the microarray technology available from Affymetrix (Santa Clara, Calif.). Partial polynucleotide sequences disclosed herein may be employed to obtain full length genes by, for example, screening of DNA expression libraries using hybridization probes or PCR primers based on the inventive sequences.

[0079] The polypeptides provided by the present invention may additionally be used in assays to determine biological activity, to raise antibodies, to isolate corresponding ligands or receptors, in assays to quantitatively determine levels of protein or cognate corresponding ligand or receptor, as anti-inflammatory agents, and in compositions for skin, connective tissue and/or nerve tissue growth or regeneration.

[0080] The isolated polynucleotides of the present invention also have utility in genome mapping, in physical mapping, and in positional cloning of genes. As detailed below, the polynucleotide sequences identified as SEQ ID NO: 1-119, 198-276, 349-372, 399-405, 410-412, 416, 418-455, 464, 466-487, 510, 511 and 514-623, and their variants, may be used to design oligonucleotide probes and primers. Oligonucleotide probes designed using the polynucleotides of the present invention may be used to detect the presence and examine the expression patterns of genes in any organism having sufficiently similar DNA and RNA sequences in their cells using techniques that are well known in the art, such as slot blot DNA hybridization techniques. Oligonucleotide primers designed using the polynucleotides of the present invention may be used for PCR amplifications. Oligonucleotide probes and primers designed using the polynucleotides of the present invention may also be used in connection with various microarray technologies, including the microarray technology of Affymetrix (Santa Clara, Calif.).

[0081] As used herein, the term “oligonucleotide” refers to a relatively short segment of a polynucleotide sequence, generally comprising between 6 and 60 nucleotides, and comprehends both probes for use in hybridization assays and primers for use in the amplification of DNA by polymerase chain reaction. An oligonucleotide probe or primer is described as “corresponding to” a polynucleotide of the present invention, including one of the sequences set out as SEQ ID NO: 1-119, 198-276, 349-372, 399-405, 410-412, 416, 418-455, 464, 466-487, 510, 511 and 514-623, or a variant thereof, if the oligonucleotide probe or primer, or its complement, is contained within one of the sequences set out as SEQ ID NO: 1-119, 198-276, 349-372, 399-405, 410-412, 416, 418-455, 464, 466-487, 510, 511 and 514-623, or a variant of one of the specified sequences. Oligonucleotide probes and primers of the present invention are substantially complementary to a polynucleotide disclosed herein.

[0082] Two single stranded sequences are said to be substantially complementary when the nucleotides of one strand, optimally aligned and compared, with the appropriate nucleotide insertions and/or deletions, pair with at least 80%, preferably at least 90% to 95% and more preferably at least 98% to 100% of the nucleotides of the other strand. Alternatively, substantial complementarity exists when a first DNA strand will selectively hybridize to a second DNA strand under stringent hybridization conditions. Stringent hybridization conditions for determining complementarity include salt conditions of less than about 1 M, more usually less than about 500 mM, and preferably less than about 200 mM. Hybridization temperatures can be as low as 5° C., but are generally greater than about 22° C., more preferably greater than about 30° C., and most preferably greater than about 37° C. Longer DNA fragments may require higher hybridization temperatures for specific hybridization. Since the stringency of hybridization may be affected by other factors such as probe composition, presence of organic solvents and extent of base mismatching, the combination of parameters is more important than the absolute measure of any one alone.

[0083] In specific embodiments, the oligonucleotide probes and/or primers comprise at least about 6 contiguous residues, more preferably at least about 10 contiguous residues, and most preferably at least about 20 contiguous residues complementary to a polynucleotide sequence of the present invention. Probes and primers of the present invention may be from about 8 to 100 base pairs in length or, preferably from about 10 to 50 base pairs in length or, more preferably from about 15 to 40 base pairs in length. The probes can be easily selected using procedures well known in the art, taking into account DNA-DNA hybridization stringencies, annealing and melting temperatures, and potential for formation of loops and other factors, which are well known in the art. Tools and software suitable for designing probes and PCR primers are well known in the art and include the software program available from Premier Biosoft International, 3786 Corina Way, Palo Alto, Calif. 94303-4504. Preferred techniques for designing PCR primers are also disclosed in Dieffenbach, CW and Dyksler, GS. PCR Primer: a laboratory manual, CSHL Press: Cold Spring Harbor, N.Y., 1995.

[0084] A plurality of oligonucleotide probes or primers corresponding to a polynucleotide of the present invention may be provided in a kit form. Such kits generally comprise multiple DNA or oligonucleotide probes or primers, each probe or primer being specific for a polynucleotide sequence. Kits of the present invention may comprise one or more probes or primers corresponding to a polynucleotide of the present invention, including a polynucleotide sequence identified in SEQ ID NO: 1-119, 198-276, 349-372, 399-405, 410-412, 416, 418-455, 464, 466-487, 510, 511 and 514-623.

[0085] In one embodiment useful for high-throughput assays, the oligonucleotide probe kits of the present invention comprise multiple probes in an array format, wherein each probe is immobilized at a predefined, spatially addressable, location on the surface of a solid substrate. Array formats which may be usefully employed in the present invention are disclosed, for example, in U.S. Pat. No. 5,412,087 and 5,545,451, and PCT Publication No. WO 95/00450, the disclosures of which are hereby incorporated by reference.

[0086] The present invention further provides methods and compositions for reducing the levels and/or inhibiting the activity of an inventive polypeptide or polynucleotide. Such methods include administering a component selected from the group consisting of: antibodies, or antigen-binding fragments thereof, that specifically bind to a polypeptide of the present invention; soluble ligands that bind to an inventive polypeptide; small molecule inhibitors of the inventive polypeptides and/or polynucleotides; anti-sense oligonucleotides to the inventive polynucleotides; small interfering RNA molecules (siRNA or RNAi) that are specific for a polynucleotide or polypeptide of the present invention; and engineered soluble polypeptide molecules that bind a ligand of an inventive polypeptide but do not stimulate signaling.

[0087] Modulating the activity of a polypeptide described herein may be accomplished by reducing or inhibiting expression of the polypeptides, which can be achieved by interfering with transcription and/or translation of the corresponding polynucleotide. Polypeptide expression may be inhibited, for example, by introducing anti-sense expression vectors; by introducing anti-sense oligodeoxyribonucleotides, anti-sense phosphorothioate oligodeoxyribonucleotides, anti-sense oligoribonucleotides or anti-sense phosphorothioate oligoribonucleotides; or by other means well known in the art. All such anti-sense polynucleotides are referred to collectively herein as “anti-sense oligonucleotides”.

[0088] The anti-sense oligonucleotides disclosed herein are sufficiently complementary to the polynucleotide encoding the inventive polypeptide to bind specifically to the polynucleotide. The sequence of an anti-sense oligonucleotide need not be 100% complementary to that of the polynucleotide in order for the anti-sense oligonucleotide to be effective in the inventive methods. Rather an anti-sense oligonucleotide is sufficiently complementary when binding of the anti-sense oligonucleotide to the polynucleotide interferes with the normal function of the polynucleotide to cause a loss of utility, and when non-specific binding of the oligonucleotide to other, non-target, sequences is avoided. The present invention thus encompasses polynucleotides in an anti-sense orientation that inhibit translation of the inventive polypeptides. The design of appropriate anti-sense oligonucleotides is well known in the art. Oligonucleotides that are complementary to the 5′ end of the message, for example the 5′ untranslated sequence up to and including the AUG initiation codon, should work most efficiently at inhibiting translation. However, oligonucleotides complementary to either the 5′- or 3′-non-translated, non-coding, regions of the targeted polynucleotide can be used.

[0089] Cell permeation and activity of anti-sense oligonucleotides can be enhanced by appropriate chemical modifications, such as the use of phenoxazine-substituted C-5 propynyl uracil oligonucleotides (Flanagan et al., Nat. Biotechnol. 17:48-52 (1999)) or 2′-O-(2-methoxy) ethyl (2′-MOE)-oligonucleotides (Zhang et al., Nat. Biotechnol. 18:862-867 (2000)). The use of techniques involving anti-sense oligonucleotides is well known in the art and is described, for example, in Robinson-Benion et al., Methods in Enzymol. 254:363-375 (1995) and Kawasaki et al., Artific. Organs 20:836-848 (1996).

[0090] Expression of a polypeptide of the present invention may also be specifically suppressed by methods such as RNA interference (RNAi). A review of this technique is found in Science, 288:1370-1372, 2000. Briefly, traditional methods of gene suppression, employing anti-sense RNA or DNA, operate by binding to the reverse sequence of a gene of interest such that binding interferes with subsequent cellular processes and therefore blocks synthesis of the corresponding protein. RNAi also operates on a post-translational level and is sequence specific, but suppresses gene expression far more efficiently. Exemplary methods for controlling or modifying gene expression are provided in WO 99/49029, WO 99/53050 and WO01/75164, the disclosures of which are hereby incorporated by reference. In these methods, post-transcriptional gene silencing is brought about by a sequence-specific RNA degradation process which results in the rapid degradation of transcripts of sequence-related genes. Studies have shown that double-stranded RNA may act as a mediator of sequence-specific gene silencing (see, for example, Montgomery and Fire, Trends in Genetics, 14:255-258, 1998). Gene constructs that produce transcripts with self-complementary regions are particularly efficient at gene silencing.

[0091] It has been demonstrated that one or more ribonucleases specifically bind to and cleave double-stranded RNA into short fragments. The ribonuclease(s) remains associated with these fragments, which in turn specifically bind to complementary mRNA, i.e. specifically bind to the transcribed mRNA strand for the gene of interest. The mRNA for the gene is also degraded by the ribonuclease(s) into short fragments, thereby obviating translation and expression of the gene. Additionally, an RNA-polymerase may act to facilitate the synthesis of numerous copies of the short fragments, which exponentially increases the efficiency of the system. A unique feature of RNAi is that silencing is not limited to the cells where it is initiated. The gene-silencing effects may be disseminated to other parts of an organism.

[0092] The polynucleotides of the present invention may thus be employed to generate gene silencing constructs and/or gene-specific self-complementary, double-stranded RNA sequences that can be delivered by conventional art-known methods. A gene construct may be employed to express the self-complementary RNA sequences. Alternatively, cells are contacted with gene-specific double-stranded RNA molecules, such that the RNA molecules are internalized into the cell cytoplasm to exert a gene silencing effect. The double-stranded RNA must have sufficient homology to the targeted gene to mediate RNAi without affecting expression of non-target genes. The double-stranded DNA is at least 20 nucleotides in length, and is preferably 21-23 nucleotides in length. Preferably, the double-stranded RNA corresponds specifically to a polynucleotide of the present invention. The use of small interfering RNA (siRNA) molecules of 21-23 nucleotides in length to suppress gene expression in mammalian cells is described in WO 01/75164. Tools for designing optimal inhibitory siRNAs include that available from DNAengine Inc. (Seattle, Wash.).

[0093] One RNAi technique employs genetic constructs within which sense and anti-sense sequences are placed in regions flanking an intron sequence in proper splicing orientation with donor and acceptor splicing sites. Alternatively, spacer sequences of various lengths may be employed to separate self-complementary regions of sequence in the construct. During processing of the gene construct transcript, intron sequences are spliced-out, allowing sense and anti-sense sequences, as well as splice junction sequences, to bind forming double-stranded RNA. Select ribonucleases then bind to and cleave the double-stranded RNA, thereby initiating the cascade of events leading to degradation of specific mRNA gene sequences, and silencing specific genes.

[0094] As used herein, the phrase “contacting a population of cells with a genetic construct, anti-sense oligonucleotide or RNA molecule” includes any means of introducing a nucleic acid molecule into any portion of one or more cells by any method compatible with cell viability and known to those of ordinary skill in the art. The cell or cells may be contacted in vivo, ex vivo, in vitro, or any combination thereof.

[0095] For in vivo uses, a genetic construct, anti-sense oligonucleotide or RNA molecule may be administered by various art-recognized procedures. See, e.g., Rolland, Crit. Rev. Therap. Drug Carrier Systems 15:143-198 (1998), and cited references. Both viral and non-viral delivery methods have been used for gene therapy. Useful viral vectors include, for example, adenovirus, adeno-associated virus (AAV), retrovirus, vaccinia virus and avian poxvirus. Improvements have been made in the efficiency of targeting genes to tumor cells with adenoviral vectors, for example, by coupling adenovirus to DNA-polylysine complexes and by strategies that exploit receptor-mediated endocytosis for selective targeting. See, e.g., Curiel et al., Hum. Gene Ther., 3:147-154 (1992); and Cristiano and Curiel, Cancer Gene Ther. 3:49-57 (1996). Non-viral methods for delivering polynucleotides are reviewed in Chang & Seymour, (Eds) Curr. Opin. Mol. Ther., vol. 2 (2000). These methods include contacting cells with naked DNA, cationic liposomes, or polyplexes of polynucleotides with cationic polymers and dendrimers for systemic administration (Chang & Seymour, Ibid.). Liposomes can be modified by incorporation of ligands that recognize cell-surface receptors and allow targeting to specific receptors for uptake by receptor-mediated endocytosis. See, for example, Xu et al., Mol. Genet. Metab., 64:193-197 (1998); and Xu et al., Hum. Gene Ther., 10:2941-2952 (1999).

[0096] Tumor-targeting bacteria, such as Salmonella, are potentially useful for delivering genes to tumors following systemic administration (Low et al., Nat. Biotechnol. 17:37-41 (1999)). Bacteria can be engineered ex vivo to penetrate and to deliver DNA with high efficiency into mammalian epithelial cells in vivo and in vitro. See, e.g., Grillot-Courvalin et al., Nat. Biotechnol. 16:862-866 (1998). Degradation-stabilized oligonucleotides may be encapsulated into liposomes and delivered to patients by injection either intravenously or directly into a target site. Alternatively, retroviral or adenoviral vectors, or naked DNA expressing anti-sense RNA for the inventive polypeptides, may be delivered into patient's cells in vitro or directly into patients in vivo by appropriate routes. Suitable techniques for use in such methods are well known in the art.

[0097] The present invention further provides binding agents, such as antibodies and antigen-binding fragments thereof, that specifically bind to a polypeptide disclosed herein, or to a portion or variant thereof. A binding agent is said to “specifically bind” to an inventive polypeptide if it reacts at a detectable level with the polypeptide, and does not react detectably with unrelated polypeptides under similar conditions Any agent that satisfies this requirement may be a binding agent. For example, a binding agent may be a ribosome, with or without a peptide component, an RNA molecule, or a polypeptide. In a preferred embodiment, a binding agent is an antibody or an antigen-binding fragment thereof. The ability of an antibody, or antigen-binding fragment thereof, to specifically bind to a polypeptide can be determined, for example, in an ELISA assay using techniques well known in the art.

[0098] An “antigen-binding site,” or “antigen-binding fragment” of an antibody refers to the part of the antibody that participates in antigen binding. The antigen binding site is formed by amino acid residues of the N-terminal variable (“V”) regions of the heavy (“H”) and light (“L”) chains. Three highly divergent stretches within the V regions of the heavy and light chains are referred to as “hypervariable regions” which are interposed between more conserved flanking stretches known as “framework regions,” or “FRs”. Thus the term “FR” refers to amino acid sequences which are naturally found between and adjacent to hypervariable regions in immunoglobulins. In an antibody molecule, the three hypervariable regions of a light chain and the three hypervariable regions of a heavy chain are disposed relative to each other in three dimensional space to form an antigen-binding surface. The antigen-binding surface is complementary to the three-dimensional surface of a bound antigen, and the three hypervariable regions of each of the heavy and light chains are referred to as “complementarity-determining regions,” or “CDRs.”

[0099] Antibodies may be prepared by any of a variety of techniques known to those of ordinary skill in the art. See, e.g., Harlow and Lane, Antibodies: A Laboratory Manual, Cold Spring Harbor Laboratory, 1988. In general, antibodies can be produced by cell culture techniques, including the generation of monoclonal antibodies as described herein, or via transfection of antibody genes into suitable bacterial or mammalian cell hosts, in order to allow for the production of recombinant antibodies. In one technique, an immunogen comprising the inventive polypeptide is initially injected into any of a wide variety of mammals (e.g., mice, rats, rabbits, sheep or goats). The polypeptides of this invention may serve as the immunogen without modification. Alternatively, particularly for relatively short polypeptides, a superior immune response may be elicited if the polypeptide is joined to a carrier protein, such as bovine serum albumin or keyhole limpet hemocyanin. The immunogen is injected into the animal host, preferably according to a predetermined schedule incorporating one or more booster immunizations, and the animals are bled periodically. Polyclonal antibodies specific for the inventive polypeptide may then be purified from such antisera by, for example, affinity chromatography using the polypeptide coupled to a suitable solid support.

[0100] Monoclonal antibodies specific for an inventive polypeptide may be prepared using the technique of Kohler and Milstein, Eur. J. Immunol. 6:511-519, 1976, and improvements thereto. These methods involve the preparation of immortal cell lines capable of producing antibodies having the desired specificity. Such cell lines may be produced from spleen cells obtained from an animal immunized as described above. The spleen cells are then immortalized by, for example, fusion with a myeloma cell fusion partner, preferably one that is syngeneic with the immunized animal. A variety of fusion techniques well known in the art may be employed. For example, the spleen cells and myeloma cells may be combined with a nonionic detergent for a few minutes and then plated at low density on a selective medium that supports the growth of hybrid cells, but not myeloma cells. A preferred selection technique uses HAT (hypoxanthine, aminopterin, thymidine) selection. After a sufficient time, usually about 1 to 2 weeks, colonies of hybrids are observed. Single colonies are selected and their culture supernatants tested for binding activity against the polypeptide. Hybridomas having high reactivity and specificity are preferred.

[0101] Monoclonal antibodies may then be isolated from the supernatants of growing hybridoma colonies. In addition, various techniques may be employed to enhance the yield, such as injection of the hybridoma cell line into the peritoneal cavity of a suitable vertebrate host, such as a mouse. Monoclonal antibodies may then be harvested from the ascites fluid or the blood. Contaminants may be removed from the antibodies by conventional techniques, such as chromatography, gel filtration, precipitation, and extraction. The polypeptides of this invention may be used in the purification process in, for example, an affinity chromatography step.

[0102] A number of molecules are known in the art that comprise antigen-binding sites capable of exhibiting the binding properties of an antibody molecule. For example, the proteolytic enzyme papain preferentially cleaves IgG molecules to yield several fragments, two of which (the “F(ab)” fragments) each comprise a covalent heterodimer that includes an intact antigen-binding site. The enzyme pepsin is able to cleave IgG molecules to provide several fragments, including the “F(ab′)₂” fragment, which comprises both antigen-binding sites. An “Fv” fragment can be produced by preferential proteolytic cleavage of an IgM, IgG or IgA immunoglobulin molecule, but are more commonly derived using recombinant techniques known in the art. The Fv fragment includes a non-covalent V_{H}::V_{L} heterodimer including an antigen-binding site which retains much of the antigen recognition and binding capabilities of the native antibody molecule (Inbar et al. Proc. Nat. Acad. Sci. USA 69:2659-2662 (1972); Hochman et al. Biochem 15:2706-2710 (1976); and Ehrlich et al. Biochem 19:4091-4096 (1980)).

[0103] The present invention further encompasses humanized antibodies that specifically bind to an inventive polypeptide. A number of humanized antibody molecules comprising an antigen-binding site derived from a non-human immunoglobulin have been described, including chimeric antibodies having rodent V regions and their associated CDRs fused to human constant domains (Winter et al. Nature 349:293-299 (1991); Lobuglio et al. Proc. Nat. Acad. Sci. USA 86:4220-4224 (1989); Shaw et al. J. Immunol. 138:4534-4538 (1987); and Brown et al. Cancer Res. 47:3577-3583 (1987)); rodent CDRs grafted into a human supporting FR prior to fusion with an appropriate human antibody constant domain (Riechmann et al. Nature 332:323-327 (1988); Verhoeyen et al. Science 239:1534-1536 (1988); and Jones et al. Nature 321:522-525 (1986)); and rodent CDRs supported by recombinantly veneered rodent FRs (European Patent Publication No. 519,596, published Dec. 23, 1992). These “humanized” molecules are designed to minimize unwanted immunological responses towards rodent antihuman antibody molecules which limit the duration and effectiveness of therapeutic applications of those moieties in human recipients.

[0104] The following Examples are offered by way of illustration and not by way of limitation.

### EXAMPLE 1

### Isolation of cDNA Sequences form Skin Cell Expression Libraries

[0105] The cDNA sequences of the present invention were obtained by high-throughput sequencing of cDNA expression libraries constructed from specialized rodent or human skin cells as shown in Table 1.

TABLE 1

| Library | Skin cell type | Source |
|---|---|---|
| DEPA | dermal papilla | rat |
| SKTC | keratinocytes | human |
| HNFF | neonatal foreskin fibroblast | human |
| MEMS | embryonic skin | mouse |
| KSCL | keratinocyte stem cell | mouse |
| TRAM | transit amplifying cells | mouse |
| MFSE | epidermis | mouse |
| HLEA | small epithelial airway cells | human |
| HLEB | small epithelial airway cells | human |
| HNKA | NK cells | human |

[0106] These cDNA libraries were prepared as described below.

[0107] cDNA Library from Dermal Papilla (DEPA)

[0108] Dermal papilla cells from rat hair vibrissae (whiskers) were grown in culture and the total RNA extracted from these cells using established protocols. Total RNA, isolated using TRIzol Reagent (BRL Life Technologies, Gaithersburg, Md.), was used to obtain mRNA using a Poly(A) Quik mRNA isolation kit (Stratagene, La Jolla, Calif.), according to the manufacturer's specifications. A cDNA expression library was then prepared from the mRNA by reverse transcriptase synthesis using a Lambda ZAP cDNA library synthesis kit (Stratagene).

[0109] cDNA Library from Keratinocytes (SKTC)

[0110] Keratinocytes obtained from human neonatal foreskins (Mitra, R and Nikoloff, B in Handbook of Keratinocyte Methods, pp. 17-24, 1994) were grown in serum-free KSFM (BRL Life Technologies) and harvested along with differentiated cells (10⁸ cells). Keratinocytes were allowed to differentiate by addition of fetal calf serum at a final concentration of 10% to the culture medium and cells were harvested after 48 hours. Total RNA was isolated from the two cell populations using TRIzol Reagent (BRL Life Technologies) and used to obtain mRNA using a Poly(A) Quik mRNA isolation kit (Stratagene). cDNAs expressed in differentiated keratinocytes were enriched by using a PCR-Select cDNA Subtraction Kit (Clontech, Palo Alto, Calif.). Briefly, mRNA was obtained from either undifferentiated keratinocytes (“driver mRNA”) or differentiated keratinocytes (“tester mRNA”) and used to synthesize cDNA. The two populations of cDNA were separately digested with RsaI to obtain shorter, blunt-ended molecules. Two tester populations were created by ligating different adaptors at the cDNA ends and two successive rounds of hybridization were performed with an excess of driver cDNA. The adaptors allowed for PCR amplification of only the differentially expressed sequences which were then ligated into T-tailed pBluescript (Hadjeb, N and Berkowitz, G A, BioTechniques 20:20-22 1996), allowing for a blue/white selection of cells containing vector with inserts. White cells were isolated and used to obtain plasmid DNA for sequencing.

[0111] cDNA Library from Human Neonatal Fibroblasts (HNFF)

[0112] Human neonatal fibroblast cells were grown in culture from explants of human neonatal foreskin and the total RNA extracted from these cells using established protocols. Total RNA, isolated using TRIzol Reagent (BRL Life Technologies, Gaithersburg, Md.), was used to obtain mRNA using a Poly(A) Quik mRNA isolation kit (Stratagene, La Jolla, Calif.), according to the manufacturer's specifications. A cDNA expression library was then prepared from the mRNA by reverse transcriptase synthesis using a Lambda ZAP cDNA library synthesis kit (Stratagene).

[0113] cDNA Library from Mouse Embryonic Skin (MEMS)

[0114] Embryonic skin was micro-dissected from day 13 post coitum Balb/c mice. Embryonic skin was washed in phosphate buffered saline and mRNA directly isolated from the tissue using the Quick Prep Micro mRNA purification kit (Pharmacia, Sweden). The mRNA was then used to prepare cDNA libraries as described above for the DEPA library.

[0115] cDNA Library from Mouse Stem Cells (KSCL) and Transit Amplifying (TRAM) Cells

[0116] Pelts obtained from 1-2 day postpartum neonatal Balb/c mice were washed and incubated in trypsin (BRL Life Technologies) to separate the epidermis from the dermis. Epidermal tissue was disrupted to disperse cells, which were then resuspended in growth medium and centrifuged over Percoll density gradients prepared according to the manufacturer's protocol (Pharmacia, Sweden). Pelleted cells were labeled using Rhodamine 123 (Bertoncello I, Hodgson G S and Bradley T R, Exp Hematol. 13:999-1006, 1985), and analyzed by flow cytometry (Epics Elite Coulter Cytometry, Hialeah, Fla.). Single cell suspensions of rhodamine-labeled murine keratinocytes were then labeled with a cross reactive anti-rat CD29 biotin monoclonal antibody (Pharmingen, San Diego, Calif.; clone Ha2/5). Cells were washed and incubated with anti-mouse CD45 phycoerythrin conjugated monoclonal antibody (Pharmingen; clone 30F11.1, 10 ug/ml) followed by labeling with streptavidin spectral red (Southern Biotechnology, Birmingham, Ala.). Sort gates were defined using listmode data to identify four populations: CD29 bright rhodamine dull CD45 negative cells; CD29 bright rhodamine bright CD45 negative cells; CD29 dull rhodamine bright CD45 negative cells; and CD29 dull rhodamine dull CD45 negative cells. Cells were sorted, pelleted and snap frozen prior to storage at −80° C. This protocol was followed multiple times to obtain sufficient cell numbers of each population to prepare cDNA libraries. Skin stem cells and transit amplifying cells are known to express CD29, the integrin β1 chain. CD45, a leukocyte specific antigen, was used as a marker for cells to be excluded in the isolation of skin stem cells and transit amplifying cells. Keratinocyte stem cells expel the rhodamine dye more efficiently than transit amplifying cells. The CD29 bright, rhodamine dull, CD45 negative population (putative keratinocyte stem cells; referred to as KSCL), and the CD29 bright, rhodamine bright, CD45 negative population (keratinocyte transit amplifying cells; referred to as TRAM) were sorted and mRNA was directly isolated from each cell population using the Quick Prep Micro mRNA purification kit (Pharmacia, Sweden). The mRNA was then used to prepare cDNA libraries as described above for the DEPA library.

[0117] cDNA Library from Epithelial Cells (MFSE)

[0118] Skin epidermis was removed from flaky skin fsn −/− mice (The Jackson Laboratory, Bar Harbour, Me.), the cells dissociated and the resulting single cell suspension placed in culture. After four passages, the cells were harvested. Total RNA, isolated using TRIzol Reagent (BRL Life Technologies, Gaithersburg, Md.), was used to obtain mRNA using a Poly(A)Quik mRNA isolation kit (Stratagene, La Jolla, Calif.), according to the manufacturer's specifications. A cDNA expression library (referred to as the MFSE library) was then prepared from the mRNA by Reverse Transcriptase synthesis using a Lambda ZAP Express cDNA library synthesis kit (Stratagene, La Jolla, Calif.).

[0119] cDNA Libraries from Human Small Airway Epithelial Cells (HLEA and HLEB)

[0120] Human small airway epithelium cells SAEC (Cell line number CC-2547, Clonetics Normal Human Cell Systems, Cambrex Corporation, East Rutherford N.J.) transformed with human papilloma virus E6E7 that was infected with the bacterium Yersinia enterocolitica (ATCC No. 51871, American Type Culture Collection, Manassas Va.) and the long form of the Respiratory Syncytial Virus (RSV, ATCC No. VR26), were used as source of RNA to construct the libraries called HLEA and HLEB. Cells from the twelfth passage of SAEC cells were infected with Y. enterocolitica for 2 hours at an initial seed of 12.5 bacteria per cell. The cells were disinfected with gentamycin (100 μg/ml) for 2 hours and harvested 4 hours after infection. The cells were then infected with RSV at a moiety of infection of 0.7 for 1 hour and incubated for 6 and 24 hours. Cells were harvested and the RNA extracted following standard protocols.

[0121] Total RNA, isolated using TRIzol Reagent (BRL Life Technologies, Gaithersburg, Md.), was used to obtain mRNA using a Poly(A) Quik mRNA isolation kit (Stratagene, La Jolla, Calif.), according to the manufacturer's specifications. Two cDNA expression libraries were then prepared from the mRNA by reverse transcriptase synthesis using a Lambda ZAP cDNA library synthesis kit (Stratagene).

[0122] cDNA Library from Epithelial Cells (HNKA)

[0123] The subtracted cDNA library (HNKA) from human natural killer (NK) cells was constructed as follows. A NK library was first constructed using pooled RNA extracted from primary NK cells from multiple donors, stimulated for 4 or 20 hours with IL-2 (10 ng/ml), IL-12 (1 ng/ml), IL-15 (50 ng/ml), interferon alpha (IFN-α; 1,000 U/ml) immobilized anti-CD16 or immobilized anti-NAIL antibody, or from unstimulated cells. RNA was extracted following standard procedures. cDNA was prepared using a TimeSaver kit (Pharmacia, Uppsala, Sweden) following the manufacturer's protocol. The cDNA was ligated to BglII adaptors and size-selected using cDNA sizing columns (Gibco BRL, Gaithersburg Md.). The size-selected NK cDNA was ligated into a pDc 409 vector and transformed into E. coli DH105 cells. Single-stranded DNA was prepared from the plasmid library using a helper phage (Stratagene)

[0124] A second cDNA library (referred to as FF cDNA library) was constructed using fetal foreskin tissue. RNA was extracted and cDNA prepared following standard protocols. The cDNA was ligated into the plasmid pBluescript following standard protocols. 10 μg of the FF cDNA library was linearized with the restriction endonuclease NotI and used as template to synthesize biotin-labeled cRNA using SP6 polymerase.

[0125] The subtracted NK cell library (HNKA) was constructed as follows. The biotinylated FF cRNA was mixed with the NK library, ethanol precipitated and resuspended in 5 μl buffer (50 mM HEPES pH 7.4, 10 mM EDTA, 1.5 M NaCl, 0.2% SDS). After addition of 5 μl formamide and heating to 95° for 1 min, the material was left to hybridize for 24 hours at 42° C. 90 μl of 10 mM HEPES pH 7.3, 1 mM EDTA and 15 μl streptavidin was added followed by an incubation for 20 min at 50° C. This step was repeated again after extraction with phenol/chloroform.

[0126] To the final extracted aqueous phase, the following were added: NaCl to 0.2 M, 1 μl glycogen and 2 volumes of ethanol. After an overnight precipitation at −20° C., the DNA was pelleted and resuspended in 10 μl water. A second round of subtraction was performed as above and the DNA transformed into E. coli DH105.

[0127] cDNA sequences were obtained by high-throughput sequencing of the cDNA libraries described above using a Perkin Elmer/Applied Biosystems Division Prism 377 sequencer.

### EXAMPLE 2

### Characterization of Isolated cDNA Sequences

[0128] The isolated cDNA sequences were compared to sequences in the EMBL DNA database using the computer algorithms FASTA and/or BLASTN. The corresponding protein sequences (DNA translated to protein in each of 6 reading frames) were compared to sequences in the SwissProt database using the computer algorithms FASTX and/or BLASTX. Comparisons of DNA sequences provided in SEQ ID NO: 1-119 to sequences in the EMBL DNA database (using FASTA) and amino acid sequences provided in SEQ ID NO: 120-197 to sequences in the SwissProt database (using FASTX) were made as of Mar. 21, 1998. Comparisons of DNA sequences provided in SEQ ID NO: 198-274 to sequences in the EMBL DNA database (using BLASTN) and amino acid sequences provided in SEQ ID NO: 275-348 to sequences in the SwissProt database (using BLASTP) were made as of Oct. 7, 1998. Comparisons of DNA sequences provided in SEQ ID NO: 349-372 to sequences in the EMBL DNA database (using BLASTN) and amino acid sequences provided in SEQ ID NO: 373-398 to sequences in the SwissProt database (using BLASTP) were made as of Jan. 23, 1999. Comparisons of polynucleotide sequences provided in SEQ ID NO: 418-455 and 466-487 to sequences in the EMBL DNA database (using BLASTN) and polypeptide sequences provided in SEQ ID NO: 456-463 and 488-509 to sequences in the SwissProt database (using BLASTP) were made as of Apr. 23, 2000. Comparisons of polynucleotide sequences provided in SEQ ID NO: 510 and 511 to sequences in the EMBL DNA database (using BLASTN) and polypeptide sequences provided in SEQ ID NO: 512 and 513 to sequences in the SwissProt database (using BLASTP) were made as of Jul. 11, 2000. Comparisons of polynucleotide sequences provided in SEQ ID NO: 514-623 to sequences in the EMBL66−HTGs+ENSEMBL (May 1, 2001) DNA database (using BLASTN) and polypeptide sequences provided in SEQ ID NO: 624-725 to sequences in the SP_TR_NRDB+ENSEMBL (Apr. 30, 2001) database (using BLASTP) were made as of May 16, 2001.

[0129] Isolated cDNA sequences and their corresponding polypeptide sequences were computer analyzed for the presence of signal sequences identifying secreted molecules. Isolated cDNA sequences that have a signal sequence at a putative start site within the sequence are provided in SEQ ID NO: 1-44, 198-238, 349-358, 399, 418-434, 440-449 and 466-471, 516, 519, 520, 523-527, 531, 532, 535-537, 548, 555, 574-580, 585-587, 589, 593, 595, 596, 598-601, 605-607, 609, 612, 613, 615, 616 and 622. The cDNA sequences of SEQ ID NO: 1-6, 198-199, 349-352, 354, 356-358,419-428, 430-433, 440-444, 446-448, 466, 468-470, 519, 520, 523, 524, 529, 531, 532, 535-537, 579, 585, 587, 598, 605, 609, 613 and 622 were determined to have less than 75% identity (determined as described above), to sequences in the EMBL database using the computer algorithms FASTA or BLASTN, as described above. The polypeptide sequences of SEQ ID NO: 120-125, 275-276, 373-380, 382, 456, 457, 460-462, 488-493, 633, 637, 642, 683, 685, 691, 693, 703, 706, 710, 714, 717, 718, 720, 721 and 725 were determined to have less than 75% identity (determined as described above) to sequences in the SwissProt database using the computer algorithms FASTX or BLASTP, as described above.

[0130] Further sequencing of some of the isolated partial cDNA sequences resulted in the isolation of the full-length cDNA sequences provided in SEQ ID NOS: 7-14, 200-231, 372, 418-422, 441-448, 514, 516, 557-561, 567, 568, 619 and 621. The polypeptide sequences encoded by the cDNA sequences of SEQ ID NO: 7-14, 200-231, 372, 514, 516, 557-561, 567, 568, 619 and 621 are provided in SEQ ID NOS: 126-133, 277-308, 396, 624, 626, 666-669, 674 and 724, respectively. The cDNA sequences of SEQ ID NO: 418-422 encode the same amino acid sequences as the cDNA sequences of SEQ ID NO: 7 and 11-14, namely SEQ ID NO: 126 and 130-133, respectively. Comparison of the full-length cDNA sequences with those in the EMBL database using the computer algorithm FASTA or BLASTN, as described above, revealed less than 75% identity (determined as described above) to known sequences, except for the polynucleotides in SEQ ID NOS: 516, 560 and 619. Comparison of the amino acid sequences provided in SEQ ID NOS: 126-133, 277-308, 666, 668, 669 and 724 with those in the SwissProt database using the computer algorithms FASTX or BLASTP, as described above, revealed less than 75% identity (determined as described above) to known sequences.

[0131] Comparison of the polypeptide sequences corresponding to the cDNA sequences of SEQ ID NOS: 15-23 with those in the EMBL database using the computer algorithm FASTA database showed less than 75% identity (determined as described above) to known sequences. These polypeptide sequences are provided in SEQ ID NOS: 134-142.

[0132] Further sequencing of some of the isolated partial cDNA sequences resulted in the isolation of full-length cDNA sequences provided in SEQ ID NOS: 24-44, 232-238, 423-434, 449, 466, 468-470, 475, 476 and 484. The polypeptide sequences encoded by the cDNA sequences of SEQ ID NO: 24-44, 232-238, 429, 466, 468-470, 475, 476 and 484 are provided in SEQ ID NOS: 143-163, 309-315, 456, 488, 490-492, 497, 498 and 506, respectively. The cDNA sequences of SEQ ID NO: 423-428, 430-434 and 449 encode the same polypeptide sequences as the cDNA sequences of SEQ ID NO: 27-29, 34, 35, 37, 40-44 and 238, namely SEQ ID NO: 146-148, 153, 154, 156, 159-163 and 315, respectively. These polypeptide sequences were determined to have less than 75% identity, determined as described above to known sequences in the SwissProt database using the computer algorithm FASTX.

[0133] Isolated cDNA sequences having less than 75% identity to known expressed sequence tags (ESTs) or to other DNA sequences in the public database, or whose corresponding polypeptide sequence showed less than 75% identity to known protein sequences, were computer analyzed for the presence of transmembrane domains coding for putative membrane-bound molecules. Isolated cDNA sequences that have one or more transmembrane domain(s) within the sequence are provided in SEQ ID NOS: 45-63, 239-253, 359-364, 400-402, 435, 436, 450-452, 455, 470-472, 542, 553-555, 573, 576, 581, 592, 593, 595 and 606. The cDNA sequences of SEQ ID NOS: 45-48, 239-249, 359-361, 363, 450, 451, 455, 472, 473, 553-555, 573, 576 and 592 were found to have less than 75% identity (determined as described above) to sequences in the EMBL database, using the FASTA or BLASTN computer algorithms. The polypeptide sequences encoded by the cDNA sequences of SEQ ID NO: 45-48, 239-249, 359-361, 363, 450, 451, 472, 473, 553-555, 573 and 606 (provided in SEQ ID NOS: 164-167, 316-326, 383, 385-388, 407-408, 460, 461, 494, 495, 662, 663, 664, 679, 682 and 711 respectively) were found to have less than 75% identity, determined as described above, to sequences in the SwissProt database using the FASTX or BLASTP database. The cDNA sequence of SEQ ID NO: 455 encodes the same polypeptide sequence as the cDNA sequence of SEQ ID NO: 359, namely SEQ ID NO: 383.

[0134] Comparison of the polypeptide sequences corresponding to the cDNA sequences of SEQ ID NOS: 49-63, 250-253, 436 and 452 with those in the SwissProt database showed less than 75% identity (determined as described above) to known sequences. These polypeptide sequences are provided in SEQ ID NOS: 168-182, 327-330, 457 and 462, respectively.

[0135] Using automated search programs to screen against sequences coding for molecules reported to be of therapeutic and/or diagnostic use, some of the cDNA sequences isolated as described above in Example 1 were determined to encode polypeptides that are family members of known protein families. A family member is herein defined to have at least 25% identity in the translated polypeptide to a known protein or member of a protein family. These cDNA sequences are provided in SEQ ID NOS: 64-76, 254-264, 365-369, 403, 437-439, 453, 454, 475-487, 510, 511, 514-527, 529-531, 533-536, 538-546, 548, 549, 553-559, 562, 564, 565, 567, 569-575, 577-589, 591-602, 604-612, 616-618, 621 and 622. The polypeptide sequences encoded by the cDNA sequences of SEQ ID NO: 64-76, 254-264, 365-369, 403, 438, 439, 453, 475-487, 510 and 511, 514-527, 529-531, 533-536, 538-546, 548, 549, 553-559, 562, 564, 565, 567, 569-575, 577-589, 591-602, 604-612, 616-618, 621 and 622 are provided in SEQ ID NOS: 183-195, 331-341, 389-393, 409, 458, 459, 463, 497-509, 624-637, 639-641, 643-646, 648-656, 658, 659, 662-668, 670, 672-681, 683-707, 709-717 and 721-725, respectively. The cDNA sequences of SEQ ID NO: 437 and 454 encode the same amino acid sequences as the cDNA sequences of SEQ ID NO: 68 and 262, namely SEQ ID NO: 187 and 339, respectively. The cDNA sequences of SEQ ID NOS: 64-68, 254-264, 365-369, 437-439, 453, 454, 475-478, 480-482, 484, 485, 487, 511, 514, 515, 517-520, 522, 523, 525, 529-531, 535, 536, 538, 541, 544-546, 549, 553-559, 564, 565, 567, 569-573, 579, 587, 588, 592, 597, 598, 602, 604, 605, 608-611, 617, 621 and 622 show less than 75% identity (determined as described above) to sequences in the EMBL database using the FASTA or BLASTN computer algorithms. Similarly, the amino acid sequences of SEQ ID NOS: 183-195, 331-341, 389-393, 458, 459, 463, 497, 498, 503-505, 507-509, 512, 513, 628, 632, 633, 637, 640, 655, 662-666, 668, 672, 673, 676, 679, 683, 685, 688, 691, 693, 694, 702, 703, 706, 707, 710, 711, 713, 714, 717, 721, 722 and 725 show less than 75% identity to sequences in the SwissProt database.

[0136] The isolated cDNA sequences encode proteins that influence the growth, differentiation and activation of several cell types, and that may usefully be developed as agents for the treatment and diagnosis of skin wounds, cancers, growth and developmental defects, and inflammatory disease. The utility for certain of the proteins of the present invention, based on similarity to known proteins, is provided in Table 2 below, together with the location of signal peptides and transmembrane domains for certain of the inventive sequences.

TABLE 2
FUNCTIONS OF NOVEL PROTEINS

| P/N | A/A | |
|---|---|---|
| SEQ | SEQ | |
| ID | ID | |
| NO: | NO. | SIMILARITY TO KNOWN PROTEINS; FUNCTION |
| 64, | 183, | Slit, a secreted molecule required for central nervous |
| 372 | 396 | system development |
| 65 | 184 | Immunoglobulin receptor family. About 40% of leukocyte |
| | | membrane polypeptides contain immunoglobulin |
| | | superfamily domains |
| 66, | 185, | RIP protein kinase, a serine/threonine kinase that contains a |
| 403, | 409, | death domain to mediate apoptosis |
| 510 | 512 | |
| 67 | 186 | Extracellular protein with epidermal growth factor domain |
| | | capable of stimulating fibroblast proliferation |
| 68, | 187 | Transforming growth factor alpha, a protein which binds |
| 437 | | epidermal growth factor receptor and stimulates growth and |
| | | mobility of keratinocytes |
| 69 | 188 | DRS protein which has a secretion signal component and |
| | | whose expression is suppressed in cells transformed by |
| | | oncogenes |
| 70 | 189 | A33 receptor with immunoglobulin-like domains and is |
| | | expressed in greater than 95% of colon tumors |
| 71 | 190 | Interleukin-12 alpha subunit, component of a cytokine that |
| | | is important in the immune defense against intracellular |
| | | pathogens. IL-12 also stimulates proliferation and |
| | | differentiation of TH1 subset of lymphocytes |
| 72 | 191 | Tumor Necrosis Factor receptor family of proteins that are |
| | | involved in the proliferation, differentiation and death of |
| | | many cell types including B and T lymphocytes. |
| 73 | 192 | Epidermal growth factor family proteins which stimulate |
| | | growth and mobility of keratinocytes and epithelial cells. |
| | | EGF is involved in wound healing. It also inhibits gastric |
| | | acid secretion. |
| 74 | 193 | Fibronectin Type III receptor family. The fibronectin III |
| | | domains are found on the extracellular regions of cytokine |
| | | receptors |
| 75 | 194 | Serine/threonine kinases (STK2_HUMAN) which |
| | | participate in cell cycle progression and signal transduction |
| 76 | 195 | Immunoglobulin receptor family |
| 254 | 331 | Receptor with immunoglobulin-like domains and homology |
| | | to A33 receptor which is expressed in greater than 95% of |
| | | colon tumors |
| 255 | 332 | Epidermal growth factor family proteins which stimulate |
| | | growth and mobility of keratinocytes and epithelial cells. |
| | | EGF is involved in wound healing. It also inhibits gastric |
| | | acid secretion. |
| 256 | 333 | Serine/threonine kinases (STK2_HUMAN) which |
| | | participate in cell cycle progression and signal transduction |
| 257 | 334 | Contains protein kinase and ankyrin domains. Possible role |
| | | in cellular growth and differentiation. |
| 258 | 335 | Notch family proteins which are receptors involved in |
| | | cellular differentiation. |
| 259 | 336 | Extracellular protein with epidermal growth factor domain |
| 260, | 337, | Fibronectin Type III receptor family. The fibronectin III |
| 453 | 463 | domains are found on the extracellular regions of cytokine |
| | | receptors. |
| 261 | 338 | Immunoglobulin receptor family |
| 262 | 339 | ADP/ATP transporter family member containing a calcium |
| | | binding site. |
| 263 | 340 | Mouse CXC chemokine family members are regulators of |
| | | epithelial, lymphoid, myeloid, stromal and neuronal cell |
| | | migration and cancers, agents for the healing of cancers, |
| | | neuro-degenerative diseases, wound healing, inflammatory |
| | | autoimmune diseases like psoriasis, asthma, Crohus disease |
| | | and as agents for the prevention of HTV-1 of leukocytes |
| 264 | 341 | Nucleotide-sugar transporter family member. |
| 365 | 389 | Transforming growth factor betas (TGF-betas) are secreted |
| | | covalently linked to latent TGF-beta-binding proteins |
| | | (LTBPs). LTBPs are deposited in the extracellular matrix |
| | | and play a role in cell growth or differentiation. |
| 366 | 390 | htegrins are Type I membrane proteins that function as |
| | | laminin and collagen receptors and play a role in cell |
| | | adhesion. |
| 367 | 391 | Integrins are Type I membrane proteins that function as |
| | | laminin and collagen receptors and play a role in cell |
| | | adhesion. |
| 368 | 392 | Cell wall protein precursor. Are involved in cellular growth |
| | | or differentiation. |
| 369 | 393 | HT protein is a secreted glycoprotein with an EGF-like |
| | | domain. It functions as a modulator of cell growth, death or |
| | | differentiation. |
| 467 | 489 | Myb proto-oncogene (c-Myb), involved in transcription |
| | | regulation and activation of transcription |
| 471 | 493 | Chondroitin sulfotransferase, a member of the HNK-1 |
| | | sulfotransferase family. These molecules are involved in |
| | | the pathogenesis of arteriosclerosis, and proliferation of |
| | | arterial smooth muscle cells during development of |
| | | arteriosclerosis. |
| 472 | 494 | 36 kDa nucleolar protein HNP36, a novel growth factor |
| | | responsive gene expressed in the pituitary and parathyroid |
| | | glands |
| 475 | 497 | Zinc protease is a matrix metalloproteinase whose activity |
| | | is directed against components of the extracellular matrix |
| | | and play an important role in the growth, metastasis and |
| | | angiogenesis of tumors. |
| 476 | 498 | Diapophytoene dehydrogenase crtn-like molecule. This |
| | | molecule is similar to the diapophytoene dehydrogenase crt |
| | | molecule in a major photosynthesis gene cluster from the |
| | | bacterium Heliobacillus mobilis |
| 477 | 499 | Protocadherin 3 family member, involved in cell to cell |
| | | interactions. |
| 478 | 500 | Integrins are Type I membrane proteins that function as |
| | | laminin and collagen receptors and play a role in cell |
| | | adhesion. |
| 479 | 501 | Integrin family member. Integrins are Type I membrane |
| | | proteins that function as laminin and collagen receptors and |
| | | play a role in cell adhesion. |
| 480 | 502 | Similar to secreted HT Protein, a secreted glycoprotein with |
| | | an EGF-like domain. It functions as a modulator of cell |
| | | growth, death or differentiation |
| 481 | 503 | Agrin family member: Agrin is produced by motoneurons |
| | | and induces the aggregation of nicotinic acetylcholine |
| | | receptors. |
| 482 | 504 | Macrophage Scavenger Receptors bind to a variety of |
| | | polyanionic ligands and display complex binding |
| | | characteristics. They have been implicated in various |
| | | macrophage-associated processes, including atherosclerosis. |
| 483 | 505 | Similar to GARP, a member of the family of leucine-rich |
| | | repeat-containing proteins involved in platelet-endothelium |
| | | interactions. |
| 484 | 506 | Epidermal growth factor family proteins which stimulate |
| | | growth and mobility of keratinocytes and epithelial cells. |
| | | EGF is involved in wound healing. It also inhibits gastric |
| | | acid secretion. |
| 485 | 507 | Colony stimulating growth factor family. |
| 486 | 508 | Cytokine receptors |
| 487 | 509 | IL17 Receptor to Interleukin 17 (IL17), a T cell derived |
| | | cytokine that may play a role in initiation or maintenance of |
| | | the inflammatory response. |
| 438 | 458 | MEGF6, a protein containing multiple EGF-like-domains. |
| 439 | 459 | Protein kinase family member involved in signal |
| | | transduction. |
| 454 | | Peroxisomal calcium-dependent solute carrier, a new |
| | | member of the mitochondrial transporter superfamily. |
| 511 | 513 | Serine/threonine kinase NEK1 is a NIMA-related protein |
| | | kinase that phosphorylates serines and threonines, but also |
| | | possesses tyrosine kinase activity. NEK1 has been |
| | | implicated in the control of meiosis and belongs to the |
| | | NIMA kinase subfamily. |
| 514 | 624 | 626 Homologue isolated from rat dermal papilla of integrin |
| | | alpha-11/beta-1 that is involved in muscle development and |
| | | maintaining integrity of adult muscle and other adult |
| | | tissues. Integrin alpha-11/beta-1 is a receptor for collagen |
| | | and belongs to the integrin alpha chain family. |
| 516 | 625 | This is a secreted molecule isolated from rat dermal papillae |
| | | with a signal peptide at the N-terminus (amino acid residues |
| | | 1 to 21; nucleotides 42 to 104). |
| 517 | 626 | Homologue isolated from a rat dermal papilla library of |
| | | OASIS (old astrocyte specifically-induced substance) and |
| | | that plays a role in regulation of the response of astrocytes |
| | | to inflammation and trauma of the central nervous system |
| | | (CNS) during gliosis. The OASIS gene encodes a putative |
| | | transcription factor belonging to the cyclic AMP responsive |
| | | element binding protein/activating transcription factor |
| | | (CREB/ATE) gene family (Honma et al., Brain Res. Mol. |
| | | Brain Res. 69: 93-103, 1999). |
| 519 | 628 | This is a secreted molecule isolated from rat dermal papillae |
| | | with a signal peptide at the N-terminus (amino acid residues |
| | | 1 to 24; nucleotides 50 to 121). |
| 520 | 630 | This is a secreted molecule isolated from rat dermal papillae |
| | | with a signal peptide at the N-terminus (amino acid residues |
| | | 1 to 35; nucleotides 67 to 171). |
| 523 | 633 | This is a secreted molecule isolated from rat dermal papillae |
| | | with a signal peptide at the N-terminus (amino acid residues |
| | | 1 to 17; nucleotides 3 to 53). |
| 524 | 634 | This is a secreted molecule isolated from rat dermal papillae |
| | | with a signal peptide at the N-terminus (amino acid residues |
| | | 1 to 20; nucleotides 13 to 72). |
| 525, | 635, | Homologue isolated from a rat dermal papilla library of |
| 534 | 644 | leucyl-specific aminopeptidase, PILS-AP and that plays role |
| | | in many physiological processes as a substrate-specific |
| | | peptidase. PILS is a new member of the M1 famile of Zn- |
| | | dependent aminopeptidases that comprises members of |
| | | closely related enzymes which are known to be involved in |
| | | a variety of physiologically important processes. |
| 526 | 636 | This is a secreted molecule isolated from rat dermal papillae |
| | | with a signal peptide at the N-terminus (amino acid residues |
| | | 1 to 26; nucleotides 114 to 191). |
| 527 | 637 | This is a secreted molecule isolated from rat dermal papillae |
| | | with a signal peptide at the N-terminus (amino acid residues |
| | | 1 to 26; nucleotides 23 to 100). |
| 529 | 639 | This is a secreted molecule isolated from rat dermal papillae |
| | | with a signal peptide at the N-terminus (amino acid residues |
| | | 1 to 17; nucleotides 37 to 87). |
| 530 | 640 | This is a homologue isolated from a rat dermal papilla |
| | | library of a maturase that is involved in RNA splicing. |
| 531 | 641 | This is a secreted molecule isolated from rat dermal papillae |
| | | with a signal peptide at the N-terminus (amino acid residues |
| | | 1 to 17; nucleotides 180 to 230). |
| 532 | 642 | This is a secreted molecule isolated from rat dermal papillae |
| | | with a signal peptide at the N-terminus (amino acid residues |
| | | 1 to 32; nucleotides 245 to 340). |
| 535 | 645 | This is a secreted molecule isolated from rat dermal papillae |
| | | with a signal peptide at the N-terminus (amino acid residues |
| | | 1 to 25; nucleotides 188 to 333). |
| 536 | 646 | This is a secreted molecule isolated from rat dermal papillae |
| | | with a signal peptide at the N-terminus (amino acid residues |
| | | 1 to 21; nucleotides 185 to 247). |
| 537 | 647 | This is a secreted molecule isolated from rat dermal papillae |
| | | with a signal peptide at the N-terminus (amino acid residues |
| | | 1 to 24; nucleotides 129 to 200). |
| 541 | 651 | This is a homologue isolated from a rat dermal papilla |
| | | library of a hepatoma-derived growth factor (HDGF) that is |
| | | involved in stimulation of cell proliferation. |
| 542 | 652 | This is a receptor-like molecule isolated from rat dermal |
| | | papillae with two transmembrane domains (amino acid |
| | | residues 20 to 40 and 58 to 78. |
| 545 | 655 | This is a homologue isolated from a rat dermal papilla |
| | | library of Link protein (LP) and that is involved in bone |
| | | formation. LP plays an essential role in endochondral bone |
| | | formation by stabilizing the supramolecular assemblies of |
| | | aggrecan and hyaluronan (Deak et al., Cytogenet. Cell |
| | | Genet. 87: 75-79, 1999). |
| 548 | 658 | This is a homologue isolated from a rat dermal papilla |
| | | library of thrombospondin (TSP). It is a secreted protein |
| | | with a signal peptide in amino acid residues 1 to 18 |
| | | (nucleotides 210 to 263). TSP is an extracellular matrix |
| | | glycoprotein whose expression has been associated with a |
| | | variety of cellular processes including growth and |
| | | embryogenesis (Laherty et al., J. Biol. Chem. 267: 3, 274- |
| | | 3, 281, 1992). |
| 553 | 662 | This is a receptor-like molecule isolated from rat dermal |
| | | papillae with a transmembrane domain (amino acid residues |
| | | 434 to 454. |
| 554 | 663 | This is a receptor-like molecule isolated from rat dermal |
| | | papillae with a transmembrane domain (amino acid residues |
| | | 546 to 566. |
| 555 | 664 | This is a homologue isolated from a rat dermal papilla |
| | | library of B7-like mouse GL50 (mGL50). It is a receptor- |
| | | like molecule with a signal peptide in residues 1 to 24 |
| | | (nucleotides 149 to 220) and a transmembrane domain in |
| | | amino acid residues 262 to 282. GL50 is a specific ligand |
| | | for the ICOS receptor and this interaction functions in |
| | | lymphocyte costimulation (Ling et al., J. Immunol. |
| | | 164: 1,653-1,657, 2000). |
| 557, | 666, | These molecules are differentially expressed in stem cells |
| 558, | 667, | but not in mature keratinocytes and are involved in |
| 561- | 670- | developmental processes. They may be employed for |
| 572 | 678 | diagnosis of tumors with an immature phenotype. |
| 559 | 668 | This is a homologue isolated from a mouse stem cell library |
| | | of ABSENT IN MELANOMA 1 protein AIM1 and that can |
| | | be used for diagnosis of tumours with an immature |
| | | phenotype. AIM1 is a novel gene whose expression is |
| | | associated with the experimental reversal of tumorigenicity |
| | | of human malignant melanoma and belongs to the |
| | | betagamma-crystallin superfamily (Ray et al., Proc. Natl. |
| | | Acad. Sci. USA 94: 3,229-3,234, 1997) |
| 560 | 669 | Homologue isolated from a mouse stem cell library of |
| | | endothelin-convertin enzyme 2 (ECE-2) and that can be |
| | | used for diagnosis of tumours with an immature phenotype. |
| | | Endothelins (ET) are a family of potent vasoactive peptides |
| | | that are produced from biologically inactive intermediates, |
| | | termed big endothelins, via a proteolytic processing at |
| | | Trp21-Val/Ile22. ECE-2, that produces mature ET-1 from |
| | | big ET-1 both in vitro and in transfected cells. ECE-2 acts |
| | | as an intracellular enzyme responsible for the conversion of |
| | | endogenously synthesized big ET-1 at the trans-Golgi |
| | | network, where the vesicular fluid is acidified (Emoto and |
| | | Yanagisawa, J. Biol. Chem. 270: 15,262-15,268, 1995). |
| 573 | 679 | Mouse homologue of EGF-like molecule containing mucin- |
| | | like hormone receptor 2 (EMR2). The isolated molecule |
| | | contains three transmembrane regions: amino acid residues |
| | | 20 to 40, 66 to 86 and 92 to 112. The epidermal growth |
| | | factor (EGF)-TM7 proteins [EMR1 and EMR2, F4/80, and |
| | | CD97] constitute a recently defined class B GPCR |
| | | subfamily and are predominantly expressed on leukocytes. |
| | | These molecules possess N-terminal EGF-like domains |
| | | coupled to a seven-span transmembrane (7TM) moiety via a |
| | | mucin-like spacer domain (Lin et al., Genomics |
| | | 67: 188-200, 2000). |
| 574 | 680 | This is a murine secreted molecule with a signal peptide at |
| | | the N-terminus (amino acid residues 1 to 17; nucleotides |
| | | 238 to 288). |
| 575 | 681 | Mouse homologue of a glucocortocoid-inducible protein |
| | | GIS5 with a signal peptide at the N-terminus (amino acid |
| | | residues 1 to 17; nucleotides 56-106). |
| 576 | 682 | This is a murine surface receptor-like molecule with a |
| | | signal peptide at the N-terminus (amino acid residues 1 to |
| | | 17; nucleotides 1179 to 199) and a transmembrane domain |
| | | (amino acid residues 179 to 199). |
| 577 | 683 | This is a murine secreted molecule with a signal peptide at |
| | | the N-terminus (amino acid residues 1 to 16; nucleotides 55 |
| | | to 102). |
| 578 | 684 | This is a murine secreted molecule with a signal peptide at |
| | | the N-terminus (amino acid residues 1 to 22; nucleotides 12 |
| | | to 77). |
| 579 | 685 | This is a murine secreted molecule with a signal peptide at |
| | | the N-terminus (amino acid residues 1 to 17; nucleotides 82 |
| | | to 132). |
| 580 | 686 | This is a murine secreted molecule with a signal peptide at |
| | | the N-terminus (amino acid residues 1 to 20; nucleotides 20 |
| | | to 79). |
| 581 | 687 | This is a murine receptor-like molecule with |
| | | transmembrane domains at amino acid residues 50 to 70; 84 |
| | | to 104; 116 to 136 and 179 to 198. |
| 585 | 691 | This is a murine secreted molecule with a signal peptide at |
| | | the N-terminus (amino acid residues 1 to 20; nucleotides |
| | | 260 to 319). |
| 586 | 695 | This is a murine secreted molecule with a signal peptide at |
| | | the N-terminus (amino acid residues 1 to 22; nucleotides |
| | | 295 to 360). |
| 587 | 693 | This is a mouse homologue of serotransferrin, also known |
| | | as siderophilin or beta-1-metal binding globulin) and that is |
| | | involved in iron transport. This homologue is a secreted |
| | | molecule with a signal peptide at the N-terminus (amino |
| | | acid residues 1 to 19; nucleotides 43 to 99). Transferrins are |
| | | iron binding transport proteins which can bind two atoms of |
| | | ferric iron in association with the binding of an anion, |
| | | usually bicarbonate. It is responsible for the transport of |
| | | iron from sites of absorption and heme degradation to those |
| | | of storage and utilization. Serum transferrin may also have |
| | | a further role in stimulating cell proliferation. Transferrin |
| | | belongs to the transferrin family. |
| 589 | 695 | This is a murine secreted molecule with a signal peptide at |
| | | the N-terminus (amino acid residues 1 to 25; nucleotides 1 |
| | | to 75). |
| 592 | 697 | This is a murine receptor-like molecule with a |
| | | transmembrane domain in amino acid residues 52 to 72. |
| 593 | 698 | Mouse homologue of channel inducing factor (CHIF) that |
| | | plays a role in ion transport. The mouse homologue has a |
| | | signal peptide at the N-terminus of the predicted |
| | | polypeptide (amino acid residues 1 to 20; nucleotides 102 to |
| | | 161) and a transmembrane domain (amino acid residues 38 |
| | | to 58). CHIF evokes a potassium channel activity (Attali et |
| | | al., Proc. Natl. Acad. Sci. USA 92: 6092-6096, 1995). |
| 595 | 700 | Homologue of hyaluronan receptor LYVE-1 that plays a |
| | | role in hyalyronan uptake. This mouse homologue has the |
| | | characteristic signal peptide and transmembrane domain of |
| | | a receptor. A signal peptide was identified in the isolated |
| | | molecule in amino acid residues 1 to 18 (nucleotides 62 to |
| | | 115) and the transmembrane domain in amino acid residues |
| | | 233 to 253. The extracellular matrix glycosaminoglycan |
| | | hyaluronan (HA) is an abundant component of skin and |
| | | mesenchymal tissues where it facilitates cell migration |
| | | during wound healing, inflammation, and embryonic |
| | | morphogenesis. Both during normal tissue homeostasis and |
| | | particularly after tissue injury, HA is mobilized from these |
| | | sites through lymphatic vessels to the lymph nodes where it |
| | | is degraded before entering the circulation for rapid uptake |
| | | by the liver. LYVE-1 is a receptor for HA on the lymph |
| | | vessel wall and plays a role in the transport of HA from |
| | | tissue to lymph (Banerji et al., J. Cell Biol. 144: 789- |
| | | 801, 1999). |
| 596 | 701 | This is a murine secreted molecule with a signal peptide at |
| | | the N-terminus (amino acid residues 1 to 21; nucleotides 7 |
| | | to 69). |
| 598 | 703 | Homologue of tumor-associated glycoprotein E4 (TAA1 or |
| | | TAGE4) that belongs to the immunoglobulin superfamily. |
| | | This molecule has a signal peptide at the N-terminus (amino |
| | | acid residues 1 to 24; nucleotides 71 to 142) and is |
| | | therefore a secreted protein. |
| 599 | 704 | Homologue of the LUNX protein, also known as |
| | | nasopharyngeal carcinoma-related protein, tracheal |
| | | epithelium enriched protein or plunc, that is expressed in |
| | | epithelial cells in the airways. It has a signal peptide at the |
| | | N-terminus (amino acid residues 1 to 19; nucleotides 39 to |
| | | 95). Expression of LUNX is restricted to the trachea, upper |
| | | airway, nasopharyngeal epithelium and salivary gland |
| | | (Bingle and Bingle, Biochim. Biophys. Acta 1493: 363- |
| | | 367, 2000). |
| 600 | 705 | This is a murine secreted molecule with a signal peptide at |
| | | the N-terminus (amino acid residues 1 to 23; nucleotides |
| | | 136 to 204. |
| 601 | 706 | Homologue of prenylcysteine lyase (EC 4.4.1.18) and that |
| | | is involved in degradation of prenylated proteins. It has a |
| | | signal peptide at the N-terminus (amino acid residues 1 to |
| | | 28; nucleotides 22 to 105). Prenylcysteine lyase is a specific |
| | | enzyme involved in the final step of prenylcysteine |
| | | metabolism in mammalian cells. The enzyme does not |
| | | require NADPH as cofactor for prenylcysteine degradation, |
| | | thus distinguishing it from cytochrome P450- and flavin- |
| | | containing monooxygenases that catalyze S-oxidation of |
| | | thioethers (Zhang et al., J. Biol. Chem. 274: 35802-35808, |
| | | 1999). |
| 605 | 710 | Homologue of endoplasmin, endoplasmic reticulum protein |
| | | 99 (ERp99), 94 kDa glucose-regulated protein (GRP94) and |
| | | polymorphic tumor rejection antigen 1 (gp96). The isolated |
| | | molecule has a signal peptide at the N-terminus (amino acid |
| | | residue 1 to 21; nucleotides 1867 to 206). ERp99 is an |
| | | abundant, conserved transmembrane glycoprotein of the |
| | | endoplasmic reticulum membrane and homologous to the |
| | | 90-kDa heat shock protein (hsp90) and the 94-kDa glucose |
| | | regulated protein (GRP94) (Mazzarella and Green, J. Biol. |
| | | Chem. 262: 8875-8883, 1987). |
| 606 | 711 | Homologue of PILRalpha, formerly known as inhibitory |
| | | receptor PIRIIalpha and that is involved in signal |
| | | transduction in various cellular processes. This molecule |
| | | contains a signal peptide at the N-terminal end (amino acid |
| | | residues 1-21 and nucleotides 47 to 139) and a |
| | | transmembrane domain at amino acid residues 191 to 211. |
| | | SHP-1-mediated dephosphorylation of protein tyrosine |
| | | residues is central to the regulation of several cell signaling |
| | | pathways. PILRalpha, a novel immunoreceptor tyrosine- |
| | | based inhibitory motif-bearing protein, recruits SHP-1 upon |
| | | tyrosine phosphorylation and is paired with the truncated |
| | | counterpart PILRbeta (Mousseau et al., J. Biol. Chem. |
| | | 275: 4467-4474, 2000). |
| 607 | 712 | This is a murine secreted molecule with a signal peptide at |
| | | the N-terminus (amino acid residues 1 to 18; nucleotides 38 |
| | | to 91. |
| 609 | 714 | Homologue of retinal short-chain dehydrogenase/reductase |
| | | retSDR2 that plays a role on retinal metabolism. It has a |
| | | signal peptide at the N-terminus at amino acid residues 1- |
| | | 29 (nucleotides 302 to 388). Retinol dehydrogenases |
| | | (RDH) catalyze the reduction of all-trans-retinal to all-trans- |
| | | retinol within the photoreceptor outer segment in the |
| | | regeneration of bleached visual pigments (Haeseleer et al., |
| | | J. Biol. Chem. 273: 21790-21799, 1998) |
| 612 | 717 | This is a murine secreted molecule with a signal peptide at |
| | | the N-terminus (amino acid residues 1 to 22; nucleotides 6 |
| | | to 71. |
| 613 | 718 | This is a murine secreted molecule with a signal peptide at |
| | | the N-terminus (amino acid residues 1 to 25; nucleotides |
| | | 210 to 284. |
| 615 | 720 | This is a murine secreted molecule with a signal peptide at |
| | | the N-terminus (amino acid residues 1 to 16; nucleotides 70 |
| | | to 117. |
| 616 | 721 | This is a murine secreted molecule with a signal peptide at |
| | | the N-terminus (amino acid residues 1 to 18; nucleotides 1 |
| | | to 54. |

[0137] The location of open reading frames (ORFs) within certain of the inventive cDNA sequences are shown in Table 3, below.

TABLE 3
LOCATION OF OPEN READING FRAMES

| SEQ ID NO | | SEQ ID NO |
|---|---|---|
| Polynucleotide | ORF | Polypeptide |
| 514 | 1-2,067 | 624 |
| 515 | 2-730 | 625 |
| 516 | 42-1,772 | 626 |
| 517 | 1-681 | 627 |
| 518 | 170-416 | 628 |
| 519 | 50-770 | 629 |
| 520 | 67-708 | 630 |
| 521 | 110-613 | 631 |
| 522 | 41-457 | 632 |
| 523 | 3-230 | 633 |
| 524 | 13-573 | 634 |
| 525 | 64-2,856 | 635 |
| 526 | 114-599 | 636 |
| 527 | 23-520 | 637 |
| 528 | 953-1,138 | 638 |
| 529 | 37-687 | 639 |
| 530 | 145-366 | 640 |
| 531 | 180-1,508 | 643 |
| 532 | 245-442 | 642 |
| 533 | 125-595 | 643 |
| 534 | 64-2,856 | 644 |
| 535 | 188-727 | 645 |
| 536 | 185-1,081 | 646 |
| 537 | 129-308 | 647 |
| 538 | 32-853 | 648 |
| 539 | 2-268 | 649 |
| 540 | 3-875 | 650 |
| 541 | 284-892 | 651 |
| 542 | 37-276 | 652 |
| 543 | 127-1,794 | 653 |
| 544 | 1-735 | 654 |
| 545 | 142-939 | 655 |
| 546 | 51-1,082 | 656 |
| 547 | 143-328 | 657 |
| 548 | 210-3,728 | 658 |
| 549 | 26-1,354 | 659 |
| 551 | 1,236-1,892 | 660 |
| 552 | 853-1,178 | 661 |
| 553 | 54-1,356 | 662 |
| 554 | 637-2,244 | 663 |
| 555 | 149-1,072 | 664 |
| 556 | 18-449 | 665 |
| 557 | 275-1,171 | 666 |
| 558 | 453-1,133 | 667 |
| 559 | 104-2,449 | 668 |
| 560 | 463-687 | 669 |
| 562 | 1-1,107 | 670 |
| 563 | 2-883 | 671 |
| 564 | 188-2,902 | 672 |
| 565 | 3-524 | 673 |
| 567 | 2,584-3,996 | 674 |
| 569 | 1-960 | 675 |
| 570 | 315-599 | 676 |
| 571 | 1-414 | 677 |
| 572 | 806-1,912 | 678 |
| 573 | 120-752 | 679 |
| 574 | 2381, 359 | 680 |
| 575 | 56-1,456 | 681 |
| 576 | 13-645 | 682 |
| 577 | 55-1,323 | 683 |
| 578 | 12-698 | 684 |
| 579 | 82-810 | 685 |
| 580 | 20-586 | 686 |
| 581 | 65-808 | 687 |
| 582 | 369-761 | 688 |
| 583 | 1-769 | 689 |
| 584 | 164-1,321 | 690 |
| 585 | 260-1,489 | 691 |
| 586 | 295-1,131 | 692 |
| 587 | 43-2,136 | 693 |
| 588 | 1-1,203 | 694 |
| 589 | 1-525 | 695 |
| 591 | 1-584 | 696 |
| 592 | 1-522 | 697 |
| 593 | 102-368 | 698 |
| 594 | 1-517 | 699 |
| 595 | 62-1,018 | 700 |
| 596 | 7-282 | 701 |
| 597 | 1-736 | 702 |
| 598 | 71-1,297 | 703 |
| 599 | 39-875 | 704 |
| 600 | 136-930 | 705 |
| 601 | 22-1,539 | 706 |
| 602 | 69-521 | 707 |
| 603 | 104-448 | 708 |
| 604 | 1-399 | 709 |
| 605 | 3,068-5,476 | 710 |
| 606 | 47-721 | 711 |
| 607 | 38-439 | 712 |
| 608 | 1-1,656 | 713 |
| 609 | 302-1,327 | 714 |
| 610 | 845-1,447 | 715 |
| 611 | 975-1,375 | 716 |
| 612 | 6-272 | 717 |
| 613 | 210-464 | 718 |
| 614 | 462-869 | 719 |
| 615 | 70-459 | 720 |
| 616 | 1-1,107 | 721 |
| 617 | 1-349 | 722 |
| 618 | 93-528 | 723 |
| 621 | 380-1,033 | 724 |
| 622 | 43-2,115 | 725 |

[0138] The cDNA sequences of SEQ ID NO: 514, 515, 516, 557, 558, 559, 560, 561, 567, 568, 619 and 621 are extended sequences of SEQ ID NO: 479, 480, 353, 91, 108, 82, 92, 81, 105, 90, 362 and 360, respectively. SEQ ID NO: 516, 520, 521, 523, 525, 526, 529, 534-536, 541-543, 546, 548, 549, 557, 574, 575, 577-581, 584-587, 589, 593, 595, 596, 598-601, 605, 607, 609, 610, 614, 616 and 622 represent full-length cDNA sequences.

[0139] The polynucleotide sequences of SEQ ID NOS: 77-117, 265-267, 404-405 and 557-611 are differentially expressed in either keratinocyte stem cells (KSCL) or in transit amplified cells (TRAM) on the basis of the number of times these sequences exclusively appear in either one of the above two libraries; more than 9 times in one and none in the other (Audic S. and Claverie J-M, Genome Research, 7:986-995, 1997). The sequences of SEQ ID NOS: 77-89, 265-267 and 365-369 were determined to have less than 75% identity to sequences in the EMBL database using the computer algorithm FASTA or BLASTN, as described above. The polypeptide sequences encoded by the cDNA sequences of SEQ ID NO: 77-117, 265-267, 404-405 and 557-611 are provided in SEQ ID NOS: 666-718. The amino acid sequences of SEQ ID NOS: 666, 668, 669, 671-673, 675, 676, 679, 682, 683, 685, 688, 690, 691, 693, 694, 702, 703, 706-708, 710, 711, 713 and 714 show less than 75% identity to sequences in the SwissProt database.

[0140] The polypeptides encoded by these polynucleotide sequences have utility as markers for identification and isolation of these cell types, and antibodies against these proteins may be usefully employed in the isolation and enrichment of these cells from complex mixtures of cells. Isolated polynucleotides and their corresponding proteins exclusive to the stem cell population can be used as drug targets to cause alterations in regulation of growth and differentiation of skin cells, or in gene targeting to transport specific therapeutic molecules to skin stem cells.

### EXAMPLE 3

### Isolation and Characterization of the Human Homolog of muTR1

[0141] The human homolog of muTR1 (SEQ ID NO: 68), obtained as described above in Example 1, was isolated by screening 50,000 pfu's of an oligo dT primed HeLa cell cDNA library. Plaque lifts, hybridization, and screening were performed using standard molecular biology techniques (Sambrook, J, Fritsch, E F and Maniatis, T, eds., Molecular Cloning: A Laboratory Manual, 2nd ed., Cold Spring Harbor Laboratory Press, Cold Spring Harbor, N.Y., 1989). The determined cDNA sequence of the isolated human homolog (huTR1) is provided in SEQ ID NO: 118, with the corresponding polypeptide sequence being provided in SEQ ID NO: 196. The library was screened using an [α³²P]-dCTP labeled double stranded cDNA probe corresponding to nucleotides 1 to 459 of the coding region within SEQ ID NO: 118.

[0142] The polypeptide sequence of huTR1 has regions similar to Transforming Growth Factor-alpha, indicating that this protein functions as an epidermal growth factor (EGF). EGF family members exist in a functional form as small peptides. Alignment of the functional peptides of the EGF family with SEQ ID NO: 196 revealed that an internal segment of SEQ ID NO: 196 (amino acids 54-104; SEQ ID NO: 343) shows greater than 40% identity to the active peptides of EGF, TGF-alpha and Epiregulin. The active peptides of the EGF family are sufficient for activity and contain several conserved residues critical for the maintenance of this activity. These residues are retained in huTR1. The inventive EGF-like protein will serve to stimulate keratinocyte growth and motility, and to inhibit the growth of epithelial-derived cancer cells. This novel gene and its encoded protein may thus be used as agents for the healing of wounds and regulators of epithelial-derived cancers.

[0143] Analysis of RNA Transcripts by Northern Blotting

[0144] Northern analysis to determine the size and distribution of mRNA for huTR1 was performed by probing human tissue mRNA blots (Clontech) with a probe comprising nucleotides 93-673 of SEQ ID NO: 118, radioactively labeled with [α³²P]-dCTP. Prehybridization, hybridization, washing and probe labeling were performed as described in Sambrook, et al., Ibid. mRNA for huTR1 was 3.5-4 kb in size and was observed to be most abundant in heart and placenta, with expression at lower levels being observed in spleen, thymus, prostate and ovary (FIG. 1).

[0145] The high abundance of mRNA for huTR1 in the heart and placenta indicates a role for huTR1 in the formation or maintenance of blood vessels, as heart and placental tissues have an increased abundance of blood vessels, and therefore endothelial cells, compared to other tissues in the body. This, in turn, demonstrates a role for huTR1 in angiogenesis and vascularization of tumors. This is supported by the ability of Transforming Growth Factor-alpha and EGF to induce de novo development of blood vessels (Schreiber, et al., Science 232:1250-1253, 1986) and stimulate DNA synthesis in endothelial cells (Schreiber, et al., Science 232:1250-1253, 1986), and their over-expression in a variety of human tumors.

[0146] Purification of muTR1 and huTR1

[0147] Polynucleotides 177-329 of muTR1 (SEQ ID NO: 268), encoding amino acids 53-103 of muTR1 (SEQ ID NO: 342), and polynucleotides 208-360 of huTR1 (SEQ ID NO: 269), encoding amino acids 54-104 of huTR1 (SEQ ID NO: 343), were cloned into the bacterial expression vector pProEX HT (BRL Life Technologies), which contains a bacterial leader sequence and N-terminal 6×Histidine tag. These constructs were transformed into competent XL1-Blue E. coli as described in Sambrook et al., Ibid.

[0148] Starter cultures of these recombinant XL1-Blue E. coli were grown overnight at 37° C. in Terrific broth containing 100 μg/ml ampicillin. This culture was spun down and used to inoculate 500 ml culture of Terrific broth containing 100 μg/ml ampicillin. Cultures were grown until the OD₅₉₅ of the cells was between 0.4 and 0.8, whereupon IPTG was added to 1 mM. Cells were induced overnight and bacteria were harvested by centrifugation.

[0149] Both the truncated polypeptide of muTR1 (SEQ ID NO: 342; referred to as muTR1a) and that of huTR1 (SEQ ID NO: 343; referred to as huTR1a) were expressed in insoluble inclusion bodies. In order to purify the polypeptides muTR1a and huTR1a, bacterial cell pellets were re-suspended in lysis buffer (20 mM Tris-HCl pH 8.0, 10 mM beta mercaptoethanol, 1 mM PMSF). To the lysed cells, 1% NP40 was added and the mix incubated on ice for 10 minutes. Lysates were further disrupted by sonication on ice at 95W for 4×15 seconds and then centrifuged for 15 minutes at 14,000 rpm to pellet the inclusion bodies.

[0150] The resulting pellet was re-suspended in lysis buffer containing 0.5% w/v CHAPS and sonicated on ice for 5-10 seconds. This mix was stored on ice for 1 hour, centrifuged at 14,000 rpm for 15 minutes at 4° C. and the supernatant discarded. The pellet was once more re-suspended in lysis buffer containing 0.5% w/v CHAPS, sonicated, centrifuged and the supernatant removed as before. The pellet was re-suspended in solubilizing buffer (6 M Guanidine HCl, 0.5 M NaCl, 20 mM Tris HCl, pH 8.0), sonicated at 95 W for 4×15 seconds and then centrifuged for 20 minutes at 14,000 rpm and 4° C. to remove debris. The supernatant was stored at 4° C. until use.

[0151] Polypeptides muTR1a and huTR1a were purified by virtue of the N-terminal 6×Histidine tag contained within the bacterial leader sequence, using a Nickel-Chelating Sepharose column (Amersham Pharmacia, Uppsala, Sweden) and following the manufacturer's recommended protocol. In order to refold the proteins once purified, the protein solution was added to 5× its volume of refolding buffer (1 mM EDTA, 1.25 mM reduced glutathione, 0.25 mM oxidized glutathione, 20 mM Tris-HCl, pH 8.0) over a period of 1 hour at 4° C. The refolding buffer was stirred rapidly during this time, and stirring continued at 4° C. overnight. The refolded proteins were then concentrated by ultrafiltration using standard protocols.

[0152] Biological Activities of Polypeptides muTR1a and huTR1a

[0153] muTR1 and huTR1 are novel members of the EGF family, which includes EGF, TGFα, epiregulin and others. These growth factors are known to act as ligands for the EGF receptor. The pathway of EGF receptor activation is well documented. Upon binding of a ligand to the EGF receptor, a cascade of events follows, including the phosphorylation of proteins known as MAP kinases. The phosphorylation of MAP kinase can thus be used as a marker of EGF receptor activation. Monoclonal antibodies exist which recognize the phosphorylated forms of 2 MAP kinase proteins—ERK1 and ERK2.

[0154] In order to examine whether purified polypeptides of muTR1a and huTR1a act as a ligand for the EGF receptor, cells from the human epidermal carcinoma cell line A431 (American Type Culture Collection, No. CRL-1555, Manassas, Va.) were seeded into 6 well plates, serum starved for 24 hours, and then stimulated with purified muTR1a or huTR1a for 5 minutes in serum free conditions. As a positive control, cells were stimulated in the same way with 10 to 100 ng/ml TGF-alpha or EGF. As a negative control, cells were stimulated with PBS containing varying amounts of LPS. Cells were immediately lysed and protein concentration of the lysates estimated by Bradford assay. 15 μg of protein from each sample was loaded onto 12% SDS-PAGE gels. The proteins were then transferred to PVDF membrane using standard techniques.

[0155] For Western blotting, membranes were incubated in blocking buffer (10 mM Tris-HCl, pH 7.6, 100 mM NaCl, 0.1% Tween-20, 5% non-fat milk) for 1 hour at room temperature. Rabbit anti-Active MAP kinase pAb (Promega, Madison, Wis.) was added to 50 ng/ml in blocking buffer and incubated overnight at 4° C. Membranes were washed for 30 mins in blocking buffer minus non-fat milk before being incubated with anti rabbit IgG-HRP antibody, at a 1:3500 dilution in blocking buffer, for 1 hour at room temperature. Membranes were washed for 30 minutes in blocking buffer minus non-fat milk, then once for 5 minutes in blocking buffer minus non-fat milk and 0.1% Tween-20. Membranes were then exposed to ECL reagents for 2 min, and then autoradiographed for 5 to 30 min.

[0156] As shown in FIG. 2, both muTR1a and huTR1a were found to induce the phosphorylation of ERK1 and ERK2 over background levels, indicating that muTR1 and huTR1 act as ligands for a cell surface receptor that activates the MAP kinase signaling pathway, possibly the EGF receptor. As shown in FIG. 11, huTR1a was also demonstrated to induce the phosphorylation of ERK1 and ERK2 in CV1/EBNA kidney epithelial cells in culture, as compared with the negative control. These assays were conducted as described above. This indicates that huTR1a acts as a ligand for a cell surface receptor that activates the MAP kinase signaling pathway, possibly the EGF receptor in HeLa and CV1/EBNA cells.

[0157] The ability of muTR1a to stimulate the growth of neonatal foreskin (NF) keratinocytes was determined as follows. NF keratinocytes derived from surgical discards were cultured in KSFM (BRL Life Technologies) supplemented with bovine pituatary extract (BPE) and epidermal growth factor (EGF). The assay was performed in 96 well flat-bottomed plates in 0.1 ml unsupplemented KSFM. MuTR1a, human transforming growth factor alpha (huTGFα) or PBS-BSA was titrated into the plates and 1×10³ NF keratinocytes were added to each well. The plates were incubated for 5 days in an atmosphere of 5% CO₂ at 37° C. The degree of cell growth was determined by MTT dye reduction as described previously (J. Imm. Meth. 93:157-165, 1986). As shown in FIG. 3, both muTR1a and the positive control human TGFα stimulated the growth of NF keratinocytes, whereas the negative control, PBS-BSA, did not.

[0158] The ability of muTR1a and huTR1a to stimulate the growth of a transformed human keratinocyte cell line, HaCaT, was determined as follows. The assay was performed in 96 well flat-bottomed plates in 0.1 ml DMEM (BRL Life Technologies) supplemented with 0.2% FCS. MuTR1a, huTR1a and PBS-BSA were titrated into the plates and 1×10³ HaCaT cells were added to each well. The plates were incubated for 5 days in an atmosphere containing 10% CO₂ at 37° C. The degree of cell growth was determined by MTT dye reduction as described previously (J. Imm. Meth. 93:157-165, 1986). As shown in FIG. 4, both muTR1a and huTR1a stimulated the growth of HaCaT cells, whereas the negative control PBS-BSA did not.

[0159] The ability of muTR1a and huTR1a to inhibit the growth of A431 cells was determined as follows. Polypeptides muTR1a (SEQ ID NO: 342) and huTR1a (SEQ ID NO: 343) and PBS-BSA were titrated as described previously (J. Cell. Biol. 93:1-4, 1982), and cell death was determined using the MTT dye reduction as described previously (J. Imm. Meth. 93:157-165, 1986). Both muTR1a and huTR1a were found to inhibit the growth of A431 cells, whereas the negative control PBS-BSA did not (FIG. 5).

[0160] These results indicate that muTR1 and huTR1 stimulate keratinocyte growth and motility, inhibit the growth of epithelial-derived cancer cells, and play a role in angiogenesis and vascularization of tumors. This novel gene and its encoded protein may thus be developed as agents for the healing of wounds, angiogenesis and regulators of epithelial-derived cancers.

[0161] Upregulation of huTR1 and mRNA Expression

[0162] HeLa cells (human cervical adenocarcinoma) were seeded in 10 cm dishes at a concentration of 1×10⁶ cells per dish. After incubation overnight, media was removed and replaced with media containing 100 ng/ml of muTR1, huTR1, huTGFα, or PBS as a negative control. After 18 hours, media was removed and the cells lysed in 2 ml of TRIzol reagent (Gibco BRL Life Technologies, Gaithersburg, Md.). Total RNA was isolated according to the manufacturer's instructions. To identify mRNA levels of huTR1 from the cDNA samples, 1 μl of cDNA was used in a standard PCR reaction. After cycling for 30 cycles, 5 μl of each PCR reaction was removed and separated on a 1.5% agarose gel. Bands were visualized by ethidium bromide staining. As can be seen from FIG. 12, both mouse and human TR1 up-regulate the mRNA levels of huTR1 as compared with cells stimulated with the negative control of PBS. Furthermore, TGFα can also up-regulate the mRNA levels of huTR1.

[0163] These results indicate that TR1 is able to sustain its own mRNA expression and subsequent protein expression, and thus is expected to be able to contribute to the progression of diseases such as psoriasis where high levels of cytokine expression are involved in the pathology of the disease. Furthermore, since TGFα can up-regulate the expression of huTR1, the up-regulation of TR1 mRNA may be critical to the mode of action of TGFα.

[0164] Serum Response Element Reporter Gene Assay

[0165] The serum response element (SRE) is a promoter element required for the regulation of many cellular immediate-early genes by growth. Studies have demonstrated that the activity of the SRE can be regulated by the MAP kinase signaling pathway. Two cell lines, PC12 (rat pheochromocytoma—neural tumor) and HaCaT (human transformed keratinocytes), containing eight SRE upstream of an SV40 promotor and luciferase reporter gene were developed in-house. 5×10³ cells were aliquoted per well of 96 well plate and grown for 24 hours in their respective media. HaCaT SRE cells were grown in 5% fetal bovine serum (FBS) in D-MEM supplemented with 2 mM L-glutamine (Sigma, St. Louis, Mo.), 1 mM sodium pyruvate (BRL Life Technologies), 0.77 mM L-asparagine (Sigma), 0.2 mM arginine (Sigma), 160 mM penicillin G (Sigma), 70 mM dihydrostreptomycin (Roche Molecular Biochemicals, Basel, Switzerland), and 0.5 mg/ml geneticin (BRL Life Technologies). PC12 SRE cells were grown in 5% fetal bovine serum in Ham F12 media supplemented with 0.4 mg/ml geneticin (BRL Life Technologies). Media was then changed to 0.1% FBS and incubated for a further 24 hours. Cells were then stimulated with a titration of TR1 from 1 μg/ml. A single dose of basic fibroblast growth factor at 100 ng/ml (R&D Systems, Minneappolis, Minn.) or epidermal growth factor at 10 ng/ml (BRL Life Technologies) was used as a positive control. Cells were incubated in the presence of muTR1 or positive control for 6 hours, washed twice in PBS and lysed with 40 μl of lysis buffer (Promega). 10 μl was transferred to a 96 well plate and 10 μl of luciferase substrate (Promega) added by direct injection into each well by a Victor² fluorimeter (Wallac), the plate was shaken and the luminescence for each well read at 3×1 sec Intervals. Fold induction of SRE was calculated using the following equation: Fold induction of SRE=Mean relative luminescence of agonist/Mean relative luminescence of negative control.

[0166] As shown in FIG. 13, muTR1 activated the SRE in both PC-12 (FIG. 13A) and HaCaT (FIG. 13B) cells. This indicates that HaCaT and PC-12 cells are able to respond to muTR1 protein and elicit a response. In the case of HaCaT cells, this is a growth response. In the case of PC-12 cells, this may be a growth, a growth inhibition, differentiation, or migration response. Thus, TR1 may be important in the development of neural cells or their differentiation into specific neural subsets. TR1 may also be important in the development and progression of neural tumors.

[0167] Inhibition by the EGF Receptor Assay

[0168] The HaCaT growth assay was conducted as previously described, with the following modifications. Concurrently with the addition of EGF and TR1 to the media, anti-EGF Receptor (EGFR) antibody (Promega, Madison, Wisconsin) or the negative control antibody, mouse IgG (PharMingen, San Diego, Calif.), were added at a concentration of 62.5 ng/ml.

[0169] As seen in FIG. 14, an antibody which blocks the function of the EGFR inhibited the mitogenicity of TR1 on HaCaT cells. This indicates that the EGFR is crucial for transmission of the TR1 mitogenic signal on HaCaT cells. TR1 may bind directly to the EGF receptor. TR1 may also bind to any other members of the EGFR family (for example, ErbB-2, -3, and/or -4) that are capable of heterodimerizing with the EGFR.

[0170] Splice Variants of huTR1

[0171] A variant of huTR1 was isolated from the same library as huTR1, following the same protocols. The sequence referred to as huTR1-1 (also known as TR1δ) is a splice variant of huTR1 and consists of the ORF of huTR1 minus amino acids 15 to 44 and 87 to 137. These deletions have the effect of deleting part of the signal sequence and following amino terminal linker sequence, residues following the second cysteine residue of the EGF motif and the following transmembrane domain. However, cysteine residue 147 (huTR1 ORF numbering) may replace the deleted cysteine and thus the disulphide bridges are likely not affected. Therefore, huTR1-1 is an intracellular form of huTR1. It functions as an agonist or an antagonist to huTR1 or other EGF family members, including EGF and TGFα. The determined nucleotide sequence of huTR1-1, is given in SEQ ID NO: 412, with the corresponding amino acid sequence being provided in SEQ ID NO: 415.

[0172] Four additional splice variants of huTr1 were isolated by PCR on first strand cDNA made from RNA isolated from HeLa cells by standard protocols. These splice variants of huTR1 are referred to as TR1-2 (also known as TR1β), TR1-3 (also known as TR1γ), TR1ε and TR1φ.

[0173] TR1-2 consists of the ORF of huTR1 minus amino acids 95 to 137. This deletion has the effect of deleting the transmembrane domain. Therefore TR1-2 is a secreted form of huTR1 and binds with equal or greater affinity to the TR1 receptor as huTr1, since the EGF domain remains intact. It functions as an agonist or an antagonist to huTR1 or other EGF family members, including EGF and TGFα. The determined cDNA sequence of TR1-2 is given in SEQ ID NO: 410 and the corresponding amino acid sequence in SEQ ID NO: 413.

[0174] TR1-3 consists of the ORF of huTR1 minus amino acids 36 to 44 and amino acids 86 to 136. These deletions have the effect of deleting part of the amino terminal linker sequence, residues following the second cysteine of the EGF motif and the following transmembrane domain. However, cysteine residue 147 (huTR1 ORF numbering) may replace the deleted cysteine and thus the disulphide bridges are likely not affected. Therefore, TR1-3 is also a secreted form of huTR1 and functions as an agonist or an antagonist to huTR1 or other EGF family members, including EGF and TGFα. The determined cDNA sequence of TR1-3 is given in SEQ ID NO: 411 and the corresponding amino acid sequence is SEQ ID NO: 414.

[0175] TR1ε consists of the ORF of huTR1 minus amino acids 86 to 136. This deletion has the effect of deleting residues following the second cysteine of the EGF motif and the transmembrane domain. However, cysteine residue 147 (huTR1 ORF numbering) may replace the deleted cysteine and thus the disulphide bridges are likely not affected. Therefore, TR1ε is also a secreted form of huTR1 and functions as an agonist or an antagonist to huTR1 or other EGF family members, including EGF and TGFα. The determined cDNA sequence of TR1ε is given in SEQ ID NO: 371 and the corresponding polypeptide sequence in SEQ ID NO: 395.

[0176] TR1φ consists of the ORF of huTR1 minus amino acids 36 to 44 and amino acids 95 to 136. These deletions have the effect of deleting part of the amino terminal linker sequence and the transmembrane domain. Therefore TR1φ is a secreted form of huTR1 and binds with equal or greater affinity to the TR1 receptor as huTr1, since the EGF domain remains intact. It functions as an agonist or an antagonist to huTR1 or other EGF family members, including EGF and TGFα. The determined nucleotide sequence of TR1φ is given in SEQ ID NO: 416 and the corresponding polypeptide sequence in SEQ ID NO: 417.

[0177] Analysis of TR1 Expression using TR1-specific Antibodies

[0178] Polyclonal antibodies were generated to the active peptide of huTr1 by immunizing rabbits with huTR1 expressed in E. coli emulsified in complete Freunds adjuvant. The TR1-specific immune response was boosted by 3 subcutaneous injections of Epigen in Freunds incomplete adjuvant at 3 weekly intervals with the same protein. Antisera were collected from the rabbits and the IgG purified by Protein A affinity chromatography. The resultant polyclonal antibody recognized human and mouse TR1 in ELISAs and by Western blotting.

[0179] Immunohistochemical analysis of human normal and diseased tissue arrays (SuperBioChips Laboratories, Seoul, Korea) revealed that epithelial cells in skin, kidney, breast, small intestine and kidney all express moderate levels of TR1. The tissues that expressed significant levels of TR1 were the spleen, where TR1 was expressed in the cells that lined the venous structures of the red pulp, the glomerulus's of the kidney, the secretory goblet cells in the stomach and a transitional cell carcinoma in the bladder. It was clear from this and a previous study analyzing rat and human arteries, that the cells surrounding vessels, probably smooth muscle cells, express TR1.

[0180] Skin biopsies taken from psoriasis patients before and after treatment with delipidated and deglycolipidated M. vaccae (U.S. Pat. Nos. 5,985,287 and 6,328,978) were analyzed for TR1 expression. All of the differentiating keratinocytes expressed TR1, whereas the immature keratinocytes in the basal layer expressed little or no TR1.

[0181] The localization of TR1 in the tissues described above indicate that inhibitors of TR1 may be employed to:

[0182] (a) block aberrant smooth muscle cell growth in diseases and conditions such as atherosclerosis, cardiovascular diseases, leiomyosarcoma, fibroids and stent overgrowth;

[0183] (b) inhibit tumor growth including transitional cell carcinomas;

[0184] (c) inhibit diseases associated with the dysfunction of the secretory processes in the stomach such as ulceration; and

[0185] (d) inhibit aberrant epithelial cell growth associated with diseases such as psoriasis, Crohns disease and epithelial tumors.

### EXAMPLE 4

### Identification, Isolation and Characterization of DP3

[0186] A partial cDNA fragment, referred to as DP3, was identified by differential display RT-PCR (modified from Liang P and Pardee A B, Science 257:967-971, 1992) using mRNA from cultured rat dermal papilla and footpad fibroblast cells, isolated by standard cell biology techniques. This double stranded cDNA was labeled with [α³²P]-dCTP and used to identify a full length DP3 clone by screening 400,000 pfu's of an oligo dT-primed rat dermal papilla cDNA library. The determined full-length cDNA sequence for DP3 is provided in SEQ ID NO: 119, with the corresponding amino acid sequence being provided in SEQ ID NO: 197. Plaque lifts, hybridization and screening were performed using standard molecular biology techniques.

### EXAMPLE 5

### Isolation and Characterization of KS1

[0187] Analysis of RNA Transcripts by Northern Blotting

[0188] Northern analysis to determine the size and distribution of mRNA for muKS1 (SEQ ID NO: 263) was performed by probing murine tissue mRNA blots with a probe consisting of nucleotides 268-499 of muKS1, radioactively labeled with [α³²P]-dCTP. Prehybridization, hybridization, washing, and probe labeling were performed as described in Sambrook, et al., Ibid. mRNA for muKS1 was 1.6 kb in size and was observed to be most abundant in brain, lung, or any muscle, and heart. Expression could also be detected in lower intestine, skin, bone marrow, and kidney. No detectable signal was found in testis, spleen, liver, thymus, stomach.

[0189] Human Homologue of muKS1

[0190] MuKS1 (SEQ ID NO: 263) was used to search the EMBL database (Release 50, plus updates to June, 1998) to identify human EST homologues. The top three homologies were to the following ESTs: accession numbers AA643952, HS1301003 and AA865643. These showed 92.63% identity over 285 nucleotides, 93.64% over 283 nucleotides and 94.035% over 285 nucleotides, respectively. Frame shifts were identified in AA643952 and HS1301003 when translated. Combination of all three ESTs identified huKS1 (SEQ ID NO: 270) and translated polypeptide SEQ ID NO: 344. Alignment of muKS1 and huKS1 polypeptides indicated 95% identity over 96 amino acids.

[0191] Identification of KSCL009274 cDNA Sequence

[0192] A directionally cloned cDNA library was constructed from immature murine keratinocytes and submitted for high-throughput sequencing. Sequence data from a clone designated KDCL009274 showed 35% identity over 72 amino acids with rat macrophage inflammatory protein-2B (MIP-2B) and 32% identity over 72 amino acids with its murine homologue. The insert of 1633bp (SEQ ID NO: 464; FIG. 15A) contained an open reading frame of 300bp with a 5′ untranslated region of 202bp and a 3′ untranslated region of 1161 bp. A poly-adenylation signal of AATAAA is present 19 base pairs upstream of the poly-A tail. The mature polypeptide (SEQ ID NO: 465) is 77 amino acids in length containing 4 conserved cysteines with no ELR motif. The putative signal peptide cleavage site beween GLY 22 and Ser 23 was predicted by the hydrophobicity profile. This putative chemokine was identical to KS1. The full length sequence was screened against the EMBL database using the BLAST program and showed some identity at the nucleotide level with human EST clones AA643952, AA865643, and HS1301003, respectively. A recently described human CXC chemokine, BRAK, has some identity with KS1 at the protein level. The alignment of KS1 (referred to in FIG. 15B as KLF-1), BRAK, and other murine α-chemokines is shown in FIG. 15B. The phylogenetic relationship between KS1 and other α-chemokine family members was determiend using the Phylip program. KS1 and BRAK demonstrate a high degree of divergence from the other α-chemokines, supporting the relatively low homology shown in the multiple alignment.

[0193] Bacterial Expression and Purification of muKS1 and huKS1

[0194] Polynucleotides 269-502 of muKS1 (SEQ ID NO: 271), encoding amino acids 23-99 of polypeptide muKS1 (SEQ ID NO: 345), and polynucleotides 55-288 of huKS1 (SEQ ID NO: 272), encoding amino acids 19-95 of polypeptide huKS1 (SEQ ID NO: 346), were cloned into the bacterial expression vector pET-16b (Novagen, Madison, Wis.), which contains a bacterial leader sequence and N-terminal 6×Histidine tag. These constructs were transformed into competent XL1-Blue E. coli as described in Sambrook et al., Ibid.

[0195] Starter cultures of recombinant BL 21 (DE3) E. coli (Novagen) containing SEQ ID NO: 271 (muKS1a) and SEQ ID NO: 272 (huKS1a) were grown in NZY broth containing 100 μg/ml ampicillin (Gibco-BRL Life Technologies) at 37° C. Cultures were spun down and used to inoculate 800 ml of NZY broth and 100 μg/ml ampicillin. Cultures were grown until the OD₅₉₅ of the cells was between 0.4 and 0.8. Bacterial expression was induced for 3 hours with 1 mM IPTG. Bacterial expression produced an induced band of approximately 15 kDa for muKS1a and huKS1a.

[0196] MuKS1a and huKS1a were expressed in insoluble inclusion bodies. In order to purify the polypeptides, bacterial cell pellets were re-suspended in lysis buffer (20 mM Tris-HCl pH 8.0, 10 mM βMercaptoethanol, 1 mM PMSF). To the lysed cells, 1% NP-40 was added and the mix incubated on ice for 10 minutes. Lysates were further disrupted by sonication on ice at 95 W for 4×15 seconds and then centrifuged for 10 minutes at 18,000 rpm to pellet the inclusion bodies.

[0197] The pellet containing the inclusion bodies was re-suspended in lysis buffer containing 0.5% w/v CHAPS and sonicated for 5-10 seconds. This mix was stored on ice for 1 hour, centrifuged at 14000 rpm for 15 minutes at 4° C. and the supernatant discarded. The pellet was once more re-suspended in lysis buffer containing 0.5% w/v CHAPS, sonicated, centrifuged, and the supernatant removed as before. The pellet was re-suspended in solubilizing buffer (6 M guanidine HCl, 0.5 M NaCl, 20 mM Tris-HCl pH 8.0), sonicated at 95W for 4×15 seconds and centrifuged for 10 minutes at 18000 rpm and 4° C. to remove debris. The supernatant was stored at 4° C. MuKS1a and huKS1a were purified by virtue of the N-terminal 6×histidine tag contained within the bacterial leader sequence, using a Nickel-Chelating sepharose column (Amersham Pharmacia, Uppsala, Sweden) and following the manufacturer's protocol. Proteins were purified twice over the column to reduce endotoxin contamination. In order to re-fold the proteins once purified, the protein solution was dialysed in a 4 M-2 M urea gradient in 20 mM tris-HCl pH 7.5+10% glycerol overnight at 4° C. The protein was then further dialysed 2× against 2 liters of 20 mM Tris-HCl pH 7.5+10% (w/v) glycerol. Preparations obtained were greater than 95% pure as determined by SDS-PAGE. Endotoxin contamination of purified proteins were determined using a limulus amebocyte lysate assay kit (BIO Whittaker, Walkersville, Md.). Endotoxin levels were <0.1 ng/μg of protein. Internal amino acid sequencing was performed on tryptic peptides of KS1.

[0198] An Fc fusion protein was produced by expression in HEK 293 T cells. 35 μg of KLF-1plGFc DNA to transfect 6×10⁶ cells per flask, 200 mls of Fc containing supernatant was produced. The Fc fusion protein was isolated by chromatography using an Affiprep protein A resin (0.3 ml column, Biorad). After loading, the column was washed with 15 mls of PBS, followed by a 5 ml wash of 50 mM Na citrate pH 5.0. The protein was then eluted with 6 column volumes of 50 mM Na citrate pH 2.5, collecting 0.3 ml fractions in tubes containing 60 μl of 2M Tris-HCl pH 8.0. Fractions were analyzed by SDS-PAGE.

[0199] Peptide Sequencing of muKS1 and huKS1

[0200] Bacterially expressed muKS1 and huKS1 were separated on polyacrylamide gels and induced bands of 15 kDa were identified. The predicted size of muKS1 is 9.4 kDa. To obtain the amino acid sequence of the 15 kDa bands, 20 μg recombinant muKS1 and huSK1 was resolved by SDS-PAGE and electroblotted onto Immobilon PVDF membrane (Millipore, Bedford, Mass.). Internal amino acid sequencing was performed on tryptic peptides of muKS1 and huKS1 by the Protein Sequencing Unit at the University of Auckland, New Zealand.

[0201] The determined amino acid sequences for muKS1 and huKS1 are given in SEQ ID NOS: 397 and 398, respectively. These amino acid sequences confirmed that the determined sequences are identical to those established on the basis of the cDNA sequences. The size discrepancy has previously been reported for other chemokines (Richmond A, Balentien E, Thomas H G, Flaggs G, Barton D E, Spiess J, Bordoni R, Francke U, Derynck R, “Molecular characterization and chromosomal mapping of melanoma growth stimulatory activity, a growth factor structurally related to beta-thromboglobulin,” EMBO J. 7:2025-2033, 1988; Liao F, Rabin R L, Yannelli J R, Koniaris L G, Vanguri P, Farber J M, “Human Nig chemokine: biochemical and functional characterization,” J. Exp. Med. 182:1301-1314, 1995). The isoelectric focusing point of these proteins was predicted to be 10.26 using DNASIS (HITACHI Software Engineering, San Francisco, Calif.). Recombinant Fc tagged KS1 expresssed and purified using protein A affinity column chromatography revealed a homogenous protein with a molecular mass of 42 kDa.

[0202] Oxidative Burst Assay

[0203] Oxidative burst assays were used to determine responding cell types. 1×10⁷ PBMC cells were resuspended in 5 ml HBSS, 20 mM HEPES, 0.5% BSA and incubated for 30 minutes at 37° C. with 5 μl 5 mM dichloro-dihydrofluorescein diacetate (H₂DCFDA, Molecular Probes, Eugene, Oreg.). 2×10⁵ H₂DCFDA-labeled cells were loaded in each well of a flat-bottomed 96 well plate. 10 μl of each agonist was added simultaneously into the well of the flat-bottomed plate to give final concentrations of 100 ng/ml (fMLP was used at 10 μM). The plate was then read on a Victor² 1420 multilabel counter (Wallac, Turku, Finland) with a 485 nm excitation wavelength and 535 nm emission wavelength. Relative fluorescence was measured at 5 minute intervals over 60 minutes.

[0204] A pronounced respiratory burst was identified in PBMC with a 2.5 fold difference between control treated cells (TR1) and cells treated with 100 ng/ml muKS1 (FIG. 8). Human stromal derived factor-1α (SDF1α) (100 ng/ml) and 10 μM formyl-Met-Leu-Phe (fMLP) were used as positive controls.

[0205] Chemotaxis Assay

[0206] Cell migration in response to muKS1 was tested using a 48 well Boyden's chamber (Neuro Probe Inc., Cabin John, Md.) as described in the manufacturer's protocol. In brief, agonists were diluted in HBSS, 20 mM HEPES, 0.5% BSA and added to the bottom wells of the chemotactic chamber. THP-1 cells were re-suspended in the same buffer at 3×10⁵ cells per 50 μl. Top and bottom wells were separated by a PVP-free polycarbonate filter with a 5 μm pore size for monocytes or 3 μm pore size for lymphocytes. Cells were added to the top well and the chamber incubated for 2 hours for monocytes and 4 hours for lymphocytes in a 5% CO₂ humidified incubator at 37° C. After incubation, the filter was fixed and cells scraped from the upper surface. The filter was then stained with Diff-Quick (Dade International Inc., Miami, Fla.) and the number of migrating cells counted in five randomly selected high power fields. The results are expressed as a migration index (the number of test migrated cells divided by the number of control migrated cells).

[0207] Using this assay, muKS1 was tested against T cells and THP-1 cells. MuKS1 induced a titrateable chemotactic effect on THP-1 cells from 0.01 ng/ml to 100 ng/ml (FIG. 9). Human SDF1α was used as a positive control and gave an equivalent migration. MuKS1 was also tested against IL-2 activated T cells. However, no migration was evidence for muKS1 even at high concentrations, whereas SDF-1α provided an obvious titrateable chemotactic stimulus. Therefore, muKS1 appears to be chemotactic for THP-1 cells but not for IL-2 activated T cells at the concentrations tested.

[0208] Flow Cytometric Binding Studies

[0209] Binding of KLF-1 to THP-1 and Jurkat cells was tested in the following manner. THP-1 or Jurkat cells (5×10⁶) were resuspended in 3 mls of wash buffer (2% FBS and 0.2% sodium azide in PBS) and pelleted at 4° C., 200×g for 5 minutes. Cells were then blocked with 0.5% mouse and goat sera for 30 minutes on ice. Cells were washed, pelleted, resuspended in 50 μl of KLF-1Fc at 10 μg/ml and incubated for 30 minutes on ice. After incubation, the cells were prepared as before and resuspended in 50 μl of goat anti-human IgG biotin (Southern Biotechnology Associates, AL) at 10 μg/ml and incuated for 30 minutes on ice. Finally, cells were washed, pelleted and resuspended in 50 μl of streptavidin-RPE (Southern Biotechnology Associates, AL) at 10 μg/ml and incuabated for a further 30 minutes on ice in the dark. Cells were washed and resuspended in 250 μl of wash buffer and stained with 1 μl of 10 μg/ml propidium iodide (Sigma) to exclude any dead cells. Purified Fc fragment (10 μg/ml) was used as a negative control in place of KLF-1Fc to determine non-specific binding. Ten thousand gated events were analyzed on log scale using PE filter arrangement with peak transmittance at 575 nm and bandwidth of 10 nm on an Elite cell sorter (Coulter Cytometry).

[0210] The respiratory burst and migration assays indicated that KS1 is active on monocytes and not T cells; therefore, the KS1 Fc fusion protein was tested in a binding study with THP-1 and Jurkat T cells. KS1 Fc showed a marked positive shift on THP-1 cells compared with the Fc fragment alone. In contrast, KS1 demonstrated no positive binding with Jurkat cells in an identical experiment.

[0211] Full Length Sequence of muKS1 Clone

[0212] The nucleotide sequence of muKS1 was extended by determining the base sequence of additional ESTs. Combination of all the ESTs identified the full-length muKS1 (SEQ ID NO: 370) and the corresponding translated polypeptide sequence in SEQ ID NO: 394.

[0213] Analysis of Human RNA Transcripts by Northern blotting

[0214] Northern blot analysis to determine the size and distribution of mRNA for the human homologue of muKS1 was performed by probing human tissue blots (Clontech, Palo Alto, Calif.) with a radioactively labeled probe consisting of nucleotides 1 to 288 of huKS1 (SEQ ID NO: 270). Prehybridization, hybridization, washing, and probe labeling were performed as described in Sambrook, et al., Ibid. mRNA for huKS1 was 1.6 kb in size and was observed to be most abundance in kidney, liver, colon, small intestine, and spleen. Expression could also be detected in pancreas, skeletal muscle, placenta, brain, heart, prostate, and thymus. No detectable signal was found in lung, ovary, and testis.

[0215] Analysis of Human RNA Transcripts in Tumor Tissue by Northern blotting

[0216] Northern blot analysis to determine distribution of huKS1 in cancer tissue was performed as described previously by probing tumor panel blots (Invitrogen, Carlsbad, Calif.). These blots make a direct comparison between normal and tumor tissue. mRNA was observed in normal uterine and cervical tissue but not in the respective tumor tissue. In contrast, expression was up-regulated in breast tumor and down-regulated in normal breast tissue. No detectable signal was found in either ovary or ovarian tumors.

[0217] Injection of Bacterially Recombinant muKS1 into C3H/HeJ Mice

[0218] Eighteen C3H/HeJ mice were divided into 3 groups and injected intraperitoneally with muKS1, GV14B, or phosphate buffered saline (PBS). GV14B is a bacterially expressed recombinant protein used as a negative control. Group 1 mice were injected with 50 μg of muKS1 in 1 ml of PBS; Group 2 mice were injected with 50 μg of GV14B in 1 ml of PBS; and Group 3 mice with 1 ml of PBS. After 18 hours, the cells in the peritoneal cavity of the mice were isolated by intraperitoneal lavage with 2×4 ml washes with harvest solution (0.02% EDTA in PBS). Viable cells were counted from individual mice from each group. Mice injected with 50 μg of muKS1 had on average a 3-fold increase in cell numbers (FIG. 10).

[0219] 20 μg of bacterial recombinant muKS1 was injected subcutaneously into the left hind foot of three C3H/HeJ mice. The same volume of PBS was injected into the same site on the right-hand side of the same animal. After 18 hours, mice were examined for inflammation. All mice showed a red swelling in the foot pad injected with bacterially recombinant KS1. From histology, sites injected with muKS1 had an inflammatory response of a mixed phenotype with mononuclear and polymorphonuclear cells present.

[0220] Injection of Bacterially Expressed muKS1a into Nude Mice

[0221] To determine whether T cells are required for the inflammatory response, the experiment was repeated using nude mice. Two nude mice were anaesthetized intraperitoneally with 75 μl of 1/10 dilution of Hypnorm (Janssen Pharmaceuticals, Buckinghamshire, England) in phosphate buffered saline. 20 ug of bacterially expressed muKS1a (SEQ ID NO: 345) was injected subcutaneously in the left hind foot, ear and left-hand side of the back. The same volume of phosphate buffered saline was injected in the same sites but on the right-hand side of the same animal. Mice were left for 18 hours and then examined for inflammation. Both mice showed a red swelling in the ear and foot sites injected with the bacterially expressed protein. No obvious inflammation could be identified in either back site. Mice were culled and biopsies taken from the ear, back and foot sites and fixed in 3.7% formol saline. Biopsies were embedded, sectioned and stained with Haemotoxylin and eosin. Sites injected with muKS1a had a marked increase in polymorphonuclear granulocytes, whereas sites injected with phosphate buffered saline had a low background infiltrate of polymorphonuclear granulocytes.

[0222] Discussion

[0223] Chemokines are a large superfamily of highly basic secreted proteins with a broad number of functions (Baggiolini, et al., Annu. Rev. Immunol., 15:675-705, 1997; Ward, et al., Immunity, 9:1-11, 1998; Horuk, Nature, 393:524-525, 1998). The polypeptide sequences of muKS1 and huKS1 have similarity to CXC chemokines, suggesting that this protein will act like other CXC chemokines. The in vivo data from nude mice supports this hypothesis. This chemokine-like protein may therefore be expected to stimulate leukocyte, epithelial, stromal, and neuronal cell migration; promote angiogenesis and vascular development; promote neuronal patterning, hemopoietic stem cell mobilization, keratinocyte and epithelial stem cell patterning and development, activation and proliferation of leukocytes; and promotion of migration in wound healing events. It has recently been shown that receptors to chemokines act as co-receptors for HIV-1 infection of CD4+cells (Cairns, et al., Nature Medicine, 4:563-568, 1998) and that high circulating levels of chemokines can render a degree of immunity to those exposed to the HIV virus (Zagury, et al., Proc. Natl. Acad. Sci. USA 95:3857-3861, 1998). This novel gene and its encoded protein may thus be usefully employed as regulators of epithelial, lymphoid, myeloid, stromal, and neuronal cells migration and cancers; as agents for the treatment of cancers, neuro-degenerative diseases, inflammatory autoimmune diseases such as psoriasis, asthma and Crohn's disease; for use in wound healing; and as agents for the prevention of HIV-1 binding and infection of leukocytes.

[0224] We have also shown that muKS1 promotes a quantifiable increase in cell numbers in the peritoneal cavity of C3H/HeJ mice injected with muKS1. Furthermore, we have shown that muKS1 induces an oxidative burst in human peripheral blood mononuclear cells and migration in the human monocyte leukemia cell line, THP-1, suggesting that monocyte/macrophages are one of the responsive cell types for KS1. In addition to this, we demonstrated that huKS1 was expressed at high levels in a number of non-lymphoid tissues, such as the colon and small intestine, and in breast tumors. It was also expressed in normal uterine and cervical tissue, but was completely down-regulated in their respective tumors. It has been shown that non-ELR chemokines have demonstrated angiostatic properties. IP-10 and Mig, two non-ELR chemokines, have previously been shown to be up-regulated during regression of tumors (Tannenbaum C S, Tubbs R, Armstrong D, Finke J H, Bukowski R M, Hamilton T A, “The CXC Chemokines IP-10 and Mig are necessary for IL-12-mediated regression of the mouse RENCA tumor,” J. Immunol. 161: 927-932, 1998), with levels of expression inversely correlating with tumor size (Kanegane C, Sgadari C, Kanegane H, Teruya-Feldstine J, Yao O, Gupta G, Farber J M, Liao F, Liu L, Tosato G, “Contribution of the CXC Chemokines IP-10 and Mig to the antitumor effects of IL-12,” J. Leuko. Biol. 64: 384-392, 1998). Furthermore, neutralizing antibodies to IP-10 and Mig would reduce the anti-tumor effect, indicating the contribution these molecules make to the anti-tumor effects. Therefore, it is expected that in the case of cervical and uterine tumors, KS1 would have similar properties.

[0225] The data demonstrates that KS1 is involved in cell migration showing that one of the responsive cell types is monocyte/macrophage. The human expression data in conjunction with the in vitro and in vivo biology demonstrates that this molecule may be a useful regulator in cell migration, and as an agent for the treatment of inflammatory diseases, such as Crohn's disease, ulcerative colitis, and rheumatoid arthritis; and cancers, such as cervical adenocarcinoma, uterine leiomyoma, and breast invasive ductal carcinoma.

### EXAMPLE 6

### Characterization of KS2

[0226] KS2 contains a transmembrane domain and may function as either a membrane-bound ligand or a receptor. Northern analysis indicated that the mRNA for KS2 was expressed in the mouse keratinocyte cell line, Pam212, consistent with the cDNA being identified in mouse keratinocytes.

[0227] Mammalian Expression

[0228] To express KS2, the extracellular domain was fused to the amino terminus of the constant domain of immunoglobulin G (Fc) that had a C-terminal 6×Histidine tag. This was performed by cloning polynucleotides 20-664 of KS2 (SEQ ID NO: 273), encoding amino acids 1-215 of polypeptide KS2 (SEQ ID NO: 347), into the mammalian expression vector pcDNA3 (Invitrogen, NV Leek, Netherlands), to the amino terminus of the constant domain of immunoglobulin G (Fc) that had a C-terminal 6×Histidine tag. This construct was transformed into competent XL1-Blue E. coli as described in Sambrook et al., Ibid. The Fc fusion construct of KS2a was expressed by transfecting Cos-1 cells in 5×T175 flasks with 180 μg of KS1a using DEAE-dextran. The supernatant was harvested after seven days and passed over a Ni-NTA column. Bound KS2a was eluted from the column and dialyzed against PBS.

[0229] The ability of the Fc fusion polypeptide of KS2a to inhibit the IL-2 induced growth of concanavalin A stimulated murine splenocytes was determined as follows. A single cell suspension was prepared from the spleens of BALB/c mice and washed into DMEM (GIBCO-BRL) supplemented with 2 mM L-glutamine, 1 mM sodium pyruvate, 0.77 mM L-asparagine, 0.2 mM L-arganine, 160 mM penicillin G, 70 mM dihydrostreptomycin sulfate, 5×10⁻² mM beta mercaptoethanol and 5% FCS (cDMEM). Splenocytes (4×10⁶/ml) were stimulated with 2 μg/ml concanavalin A for 24 hrs at 37° C. in 10% CO₂. The cells were harvested from the culture, washed 3 times in cDMEM and resuspended in cDMEM supplemented with 10 ng/ml rhuIL-2 at 1×10⁵ cells/ml. The assay was performed in 96 well round bottomed plates in 0.2 ml cDMEM. The Fc fusion polypeptide of KS2a, PBS, LPS and BSA were titrated into the plates and 1×10⁴ activated T cells (0.1 ml) were added to each well. The plates were incubated for 2 days in an atmosphere containing 10% CO₂ at 37° C. The degree of proliferation was determined by pulsing the cells with 0.25 uCi/ml tritiated thymidine for the final 4 hrs of culture after which the cells were harvested onto glass fiber filtermats and the degree of thymidine incorporation determined by standard liquid scintillation techniques. As shown in FIG. 6, the Fc fusion polypeptide of KS2a was found to inhibit the IL-2 induced growth of concanavalin A stimulated murine splenocytes, whereas the negative controls PBS, BSA and LPS did not.

[0230] This data demonstrates that KS2 is expressed in skin keratinocytes and inhibits the growth of cytokine induced splenocytes. This indicates a role for KS2 in the regulation of skin inflammation and malignancy.

### EXAMPLE 7

### Characterization of KS3

[0231] KS3 encodes a polypeptide of 40 amino acids (SEQ ID NO: 129). KS3 contains a signal sequence of 23 amino acids that would result in a mature polypeptide of 17 amino acids (SEQ ID NO: 348; referred to as KS3a).

[0232] KS3a was prepared synthetically (Chiron Technologies, Victoria, Australia) and observed to enhance transferrin-induced growth of the rat intestinal epithelial cells IEC-18 cells. The assay was performed in 96 well flat-bottomed plates in 0.1 ml DMEM (GIBCO-BRL Life Technologies) supplemented with 0.2% FCS. KS3a (SEQ ID NO: 348), apo-Transferrin, media and PBS-BSA were titrated either alone, with 750 ng/ml Apo-transferrin or with 750 ng/ml BSA, into the plates and 1×10³ IEC-18 cells were added to each well. The plates were incubated for 5 days at 37° C. in an atmosphere containing 10% CO₂. The degree of cell growth was determined by MTT dye reduction as described previously (J. Imm. Meth. 93:157-165, 1986). As shown in FIG. 7, KS3a plus Apo-transferrin was found to enhance transferrin-induced growth of IEC-18 cells, whereas KS3a alone or PBS-BSA did not, indicating that KS3a and Apo-transferrin act synergistically to induce the growth of IEC-18 cells.

[0233] This data indicates that KS3 is epithelial derived and stimulates the growth of epithelial cells of the intestine. This suggests a role for KS3 in wound healing, protection from radiation- or drug-induced intestinal disease, and integrity of the epithelium of the intestine.

[0234] SEQ ID NOS: 1-725 are set out in the attached Sequence Listing. The codes for polynucleotide and polypeptide sequences used in the attached Sequence Listing confirm to WIPO Standard ST.25 (1988), Appendix 2.

[0235] All references cited herein, including patent references and non-patent references, are hereby incorporated by reference in their entireties.

[0236] Although the present invention has been described in terms of specific embodiments, changes and modifications can be carried out without departing from the scope of the invention which is intended to be limited only by the scope of the appended claims.

The application's sequence listing, which the Patent Office published only in electronic form, follows.

SEQUENCE LISTING (725 sequences)

SEQ ID NO: 1 - DNA, 696 bp, Rat
aattcggcacgaggccgaggcgggcaggcaccagccagagcagctggcggcagacagtcggaccgagacagttggaccgagacagtcgaacggtctaacagggcctggcttgcctacctggcagctgcacccggtccttttcccagagctggttctgtgggtcaacatggtcccctgcttcctcctgtctctgctgctacttgtgaggcctgcgcctgtggtggcctactctgtgtccctcccggcctccttcctggaggaagtggcgggcagtggggaagctgagggttcttcagcctcttccccaagcctgctgccgccccggactccagccttcagtcccacaccagggaggacccagcccacagctccggtcggccctgtgccacccaccaacctcctggatgggatcgtggacttcttccgccagtatgtgatgctcattgcggtggtgggctcgctgacctttctcatcatgttcatagtctgcgcggcactcatcacgcgccagaagcacaaggccacagcctactacccgtcctctttccccgaaaagaagtatgtggaccagagagaccgggctggggggccccatgccttcagcgaggtccctgacagggcacctgacagccggcaggaagagggcctggacttcttccagcagctccaggctgacattctggcttgctactcaga

SEQ ID NO: 2 - DNA, 475 bp, Rat
cggtatcgataagcttgatatcgaattcctgcaggtcgacactagtggatccaaagaattcggcacgagaaaataaccaaccaaacaaactttcctcttcccgctagaaaaaacaaattctttaaggatggagctgctctactggtgtttgctgtgcctcctgttaccactcacctccaggacccagaagctgcccaccagagatgaggaactttttcagatgcagatccgggataaggcattgtttcacgattcatccgtgattccagatggagctgaaatcagcagttacctatttagagatacacctagaaggtatttcttcatggttgaggaagataacaccccactgtcagtcacagtgacaccttgtgatgcgcctttggaatggaagcttagcctccaggagctgcctgaggagtccagtgcagatgggtcaggtgacccagaaccacttgaccagcagaagcagcag

SEQ ID NO: 3 - DNA, 381 bp, Human
ctggagatcctggggatccaggtgatcccggtagaaccaggcagatttgttgtagatgactggctggtgaggttagtcttcgttccactggacagggaaagcttgaaacttgggctctgccgtccagaaaggtttgttttcagaagcacttccttttcctcactttcttttaatttcttcctttccatgaatttacttattggatccataatattatcatcatttttagttttgtcagatggagacactacagcttctccatcttccatgtcatcttcatctgtgttaaaccacatctcttcttcatcttctagtgtctggcatctcttcgatatctgtgattcctcaaaatggaacgcatactgtcaagtttgggggtaa

SEQ ID NO: 4 - DNA, 311 bp, Human
agcgtggtcgcggccgaggtactacagactttgtgataaggctgaagcttggggcatcgtcctagaaacggtggccacagctggggttgtgacctcggtggccttcatgctcactctcccgatcctcgtctgcaaggtgcaggactccaacaggcgaaaaatgctgcctactcagtttctcttcctcctgggtgtgttgggcatctttggcctcaccttcgccttcatcatcggactggacgggagcacagggcccacacgcttcttcctctttgggatcctcttttccatctgcttctcctgcctgctgg

SEQ ID NO: 5 - DNA, 514 bp, Mouse
ctggagctcgcgcgcctgcaggtcgacactagtggatccaaagcttaaaagagactccacccactccagtagaccggggactaaaacagaaattctgagaaagcagcaagaagcagaagaaatagctatttcacagcagtaacagaagctacctgctataataaagacctcaacactgctgaccatgatcagcccagcctggagcctcttcctcatcgggactaaaattgggctgttcttccaagtggcacctctgtcagttgtggctaaatcctgtccatctgtatgtcgctgtgacgcaggcttcatttactgtaacgatcgctctctgacatccattccagtgggaattccggaggatgctacaacactctaccttcagaacaaccaaataaacaatgttgggattccttccgatttgaagaacttgctgaaagtacaaagaatatacctataccacaacagtttagatgaattccctaccaaccttccaaagtatgtcaaagagttacat

SEQ ID NO: 6 - DNA, 1059 bp, Mouse
ggcacgagcctgctgccctcttgcagacaggaaagacatggtctctgcgcccggatcctacagaagctcatggggagccccagactggcagccttgctcctgtctctcccgctactgctcatcggcctcgctgtgtctgctcgggttgcctgcccctgcctgcggagttggaccagccactgtctcctggcctaccgtgtggataaacgttttgctggccttcagtggggctggttccctctcttggtgaggaaatctaaaagtcctcctaaatttgaagactattggaggcacaggacaccagcatccttccagaggaagctgctaggcagcccttccctgtctgaggaaagccatcgaatttccatcccctcctcagccatctcccacagaggccaacgcaccaaaagggcccagccttcagctgcagaaggaagagaacatctccctgaagcagggtcacaaaagtgtggaggacctgaattctcctttgatttgctgcccgaggtgcaggctgttcgggtgactattcctgcaggccccaaggccagtgtgcgcctttgttatcagtgggcactggaatgtgaagacttgagtagcccttttgatacccagaaaattgtgtctggaggccacactgtagacctgccttatgaattccttctgccctgcatgtgcatagaggcctcctacctgcaagaggacactgtgaggcgcaaaaagtgtcccttccagagctggcctgaagcttatggctcagacttctggcagtcaatacgcttcactgactacagccagcacaatcagatggtcatggctctgacactccgctgcccactgaaactggaggcctccctctgctggaggcaggacccactcacaccctgcgaaacccttcccaacgccacagcacaggagtcagaaggatggtatatcctggagaatgtggacttgcacccccagctctgctttaagttctcatttgaaaacagcagccacgttgaatgtccccaccagagtggctctctcccatcctggactgtgagcatggatacccag

SEQ ID NO: 7 - DNA, 861 bp, Rat
gaattcggcacgagaggagagaaagagaagtgtgcacaaagaaacttgtattattattaattagcacctagcttgtttgtgtctgatacaccaccaagtagtaattgttgaaaaaacgaagaagaaaaaaaaaaaacaaaaaaaccaaacagtgggtactcaaataagataggagaaaaatgagagaacagacccagttctcgacccttgcttctcaaggtcctcccaccaggctgccaaagcaagatggtgttgctctgatccagtcagtattcttttgacttttttttttaatctccaggttttggttcaggctcccatattcataccctggctcatttagctttccctcatgttgtgggttcttctgtccctcacccccttactctccccactgatattcttcccagtcaagactgtggctctggaagaaatatccaccatttgcagagctgatgttctgtagatcgtaatgttgaagcgctgggtgtcctggttggcagaatcactcctgtattactctggtacataggtgtctcctgatagactccctggccttagtcatggggtgttttctagaggcagactaagacaggagtcaaaaaagatttagaggaaggagctgaggaaagaaagacagttgtgggaggaaaatcaagttctactcaggatcccgagtgtttctgtagatgtagattggaatgtgtccataacagagaggccagtgagagacatccccaaggacctgccaggctttccttcgctccaggaagacgcaccatcactcaaaaggggtttcctagaaagaaagacaagtgacttaaaaaatctgccagtgggttcttgaagtcatcgaaccta

SEQ ID NO: 8 - DNA, 398 bp, Mouse
gtcaccagcaaaggtggaaacaaattctttgaaggactctgacagccctgggtctccaaggctgctgggaccagtcttagcctcttgtggcaagtggtaggaatgtgaatctttgcgaccagggggatcagaaatggggtctcccatttctggtgtctgcccagtccttccaggtgggctcttcgtagccctggggtggattttcctcctcttccacagagatgctttttctctgcataccatgtctgctggtttcccataatctccctcaaacccacaccaccctccactgaggctcagccccagagccatgaaaactcccaccagtttccaggatagagtctggacagaactggggccctggttgccaagtggtgaaaaaaggaatggcccccctg

SEQ ID NO: 9 - DNA, 1060 bp, Mouse
agaacattcgagaatatgttcggtggatgatgtattggattgtctttgcgatcttcatggcagcagaaaccttcacagacatcttcatttcctggtccggcccacggattggcaggccatggggttgggaagggcctcaccaccaccaccacctggcctctggctcacacaaacccctccccttgcttacacacaggttcccgttttattacgagttcaagatggcttttgtgctgtggctgctctcaccttacaccaagggggccagcctgctttaccgaaagtttgtccacccatccctatcccgccatgagaaggagatcgacgcatgtatcgtgcaggcaaaggagcgcagctatgaaaccatgctcagttttgggaagcggagcctcaacatcgctgcctcagctgctgtgcaggctgctaccaagagtcaaggcgctctagctggaaggctacggagtttctctatgcaagacctgcgctctatccctgacacccctgtccccacctaccaagatcccctctacctggaagaccaggtaccccgacgtagaccccctattggataccggccaggcggcctgcagggcagtgacacagaggatgagtgttggtcagacaatgagattgtcccccagccacctgttcggccccgagagaagcctctaggccgcagccagagccttcgggtggtcaagaggaagccattgactcgagagggcacctcacgctccctgaaggtccgaacccggaaaaaggccatgccctcagacatggacagctagagtctgcagattgaggccaccttacctctggagccagcaggggacctttcgctgctacaccagctaccggggttctgctccgtctggcttgtgcctaaatggcacatggcgtggtaccctgcacagggagacattcactgtaccaaagcagcccaggcctggggcctatttattgccttcctctgccttttgctttctcagacatgggaccagagccccaccagtccctaccgacgaaaccaaaagtccaaccagctgtgttcattccttct

SEQ ID NO: 10 - DNA, 353 bp, Mouse
ggaaagtcatctacctgctggtggcctccatcagagccgggagatctccactgtgtgtatggagaccgcattgatagcttactctcttcctgaactacaggatgaaggccatggctctgagcctaggagcaagcccagtgcttgcttttctcctctctgggtacagtgatggttaccaagtgtgtagtaggttcggaagcaaagtgcctcagtttctgaactagaactacagctctgtctgccttagcacagacaggcgttgtctcattcctctcacctgccctacccatgcatgactcgtccgcttattgaggggcaggtgagtcatctgagatgctatttgaaacatgaga

SEQ ID NO: 11 - DNA, 969 bp, Mouse
cggcacgagagagtatgaagccagagtcttagagaagtcactgagaaaagaatccagaaacaaagagaccgacaaggtgaagctgacctggagggaccgattcccagcctatttcaccaatcttgtctccatcatcttcatgatcgcagtgacatttgcaatcgtcctcggagttatcatctatagaatctccacagctgcagccttggccatgaactcctccccgtctgtgcggtccaacatccgggttacagtcacggccaccgctgttatcatcaacctcgtggtcatcattctgctggatgaagtttacggctgcattgccaggtggctcaccaagattggtgagtgccatgtgcaggacagcataggcagcatgggcctagggcagggccagccttgaagtgggcagcctggtcacagaactgtggctagtcccaacttcccctggcctggcctggctgtgagtggctagcagctggcacagtcagtaccgtatgtctctcctcagaggtcccaaagacagagaagagctttgaggagaggctaaccttcaaggccttcctgctcaagtttgtgaactcttacactcccatcttctatgtcgccttcttcaaaggccggtttgttggtcggcccggtgactacgtgtacatcttccgctctttccggatggaggagtgtgccccgggcggctgcctcatggagctctgtatccagctgagcatcattatgctgggcaagcagctaatccagaacaatctcttcgagattggcatcccgaagatgaaaaagttcatccgctacctgaagctgcgcagacagagcccctcagaccgtgaagagtacgtgaagcggaagcagcgctatgaggtggacttcaacctcgaacctttcgccggcctcacgcccgagtacatggaaatgatcattcagttcggctttgtcaccctgtttgttgcgtccttc

SEQ ID NO: 12 - DNA, 1411 bp, Mouse
ggcacgaggcaacttggacactaaagctaggtaccagcctgttagtttacatgagttcaaaattcaggtcagggtctctgaaatggagtctgaatttaaaagctttggcctctcatgtgaataatacatatgtcatgtgtcatttgaatagtttcagtcacacacactttgtatttctctaagtgtaacgcatgtgtagtgggtggttgtagtatgatttctccgtctttcttgtttgaatgtttggacttgtgcacgtgtgcacatgtgtgtgtgtgtgtgtgtgtgtgtgtgtgtgtgtgtgtatttgctcctgtggctatgtgcatgtgccatgtgggtgtgtgtgcttgtgggggccagaggttaggtaccttcctctatctctccaccctggtggtttttgttttgttttgttttgttttggaccaggtctatcactgataagctaggttggatggcttctgagaagagtctgcctctctgtccccctgcccctyctccccccagccctcaggttacagataagtgccacaagtccttgtcctttcaagtagcctctagggatccaggctcatatccttgtgcttactgactgagccacctctcagctccctcagccccgttttacacgttaactttgtctcctgtctatgcctgctctcttcagtgaccccttccgttttcctttcactcttttctctgaatagatttgtgtgcgagagactattatcatatggatgcataaatatcatctgcaaagtcaatcgcaggaaagacttagagtctctttagctttatgactgtaaaggattccgcttcttgccattgattcagcttttttgccattgatcctttattagagatcaattagagtcgtatacaaagaccttggctgggccctgagggtctatctcaggctaggccctgagggtctatctcaggctaggccctgagggtctatctcaggatagatggatttaactgcttttctcaagacgcttttactctctcgttgaattctttttaaacttttaattgacattgtacttgcattcttatgggaaacagggtgacccacacacatgtgtacacaggtacacacacagtcaggtcagcatagctggtatgttgttgtttatgttggggacagtcagattggtattgtttttgcactgtgctgtggaacattggaaaaccttatctgatggtgaccctgtgcctactaacagccctcactaggatacattttggagtctctggcaaccacaattttgctctatttccatgagtccagcatctctactactgcatagaagtaaaaaaaaaaaaaaaaaactcgagagtacttctagagcggccgcgggccccccctcgaggtcgacggtatcgataagcttgatatcgaatt

SEQ ID NO: 13 - DNA, 888 bp, Mouse
ggcacgagaggaccttgaccgacatccagaccacgggacccgactggatgtctcaccctgcccctgcaggccctgtcccttccaaaacaggcacttctgtcacaggatacttttttttttaacttaaatttgcttgggggaggggagcagttctagttccatgaggcacaaatggaggtcaaagagcaacttgccgatgtctcttctctcctcccactgtgtgggtagtaggaattgaatcaggttatcgatcttggggctgagccatctctgtggcccacagagcacttatatgtggttacttgttgctctcacattgtcagtgtacagcttggtggcctttgtcactggcatgctctgtgacactgttgtgataaaaatgttgatgagtttacacaaatctagtaaattgaacccaagagccaagtgtggtggtgtacccttaattccagcactttgggggcaagttcaggtagttctctgaatttgagagcctcctggcccacatagtgagttccatggctgcgtagttgcaaaagaacaccaacacctttcccccacaaatagaattgtactgaaggtcacagtcagagaaagcatagcaaggatggctgctctgagcccctcctgtgcacttctgtagacctagccccggtgtctaaatggagtctgattttagcacctgcacttgactgctgtgctccaccctgacccgccttytcctgatcccagattgctagaactttgaccaaaatgggacttaattggagttgtgattggkatgttcattgatttaaagtgctctttacattttaaggaaactaaccctttgggtaagaaaaaaaaaaaaaaaaaaaaaaaaaaaaaaaaaaaaaaaaaaaaaaaaaa

SEQ ID NO: 14 - DNA, 547 bp, Mouse
gaattcggcacgagcctaaatgctgggattaaaggcgtgcgccactactgccaggctgttttttttttttttttttttttattaatgatctgccagacaaagagatgtcctttttggtgcaaaagtcacccaatgcttgaagtcactatatttgattagctctgtaactgatacacaaataaaactttccattatggataatacattatctattattatttatctcttgttcatttttgcaatttctgtacttgactcccagttgagtacaaggtgcctttggtggttttccaaggatcttgaggttacatgaaattgctgatgatgtctgttgaaagcattgtatggaggcctgaggtatatttggcctgagagcagagtttttaaaatagagcctgctggaaaagctagctggagcttctgactactttagaaaggcactgtttgaagcacaggccatgaagtaagacttgctttctagttaaattgaggttttttgtttttttaagtcwttagtgtatagagatttcctacattttttgtggtt

SEQ ID NO: 15 - DNA, 318 bp, Rat
ctgacatgaagccccctaagacccaaagattggttcctgctgtgacatgcctaccatgtggccacttcttcatgtcctctggcttgctctggtctgtggctctgttcacaccaccctgtcaaagtcagatgccaaaaaagctgcctcaaagacgctgctggaaaagactcagttttcggataaacctgtccaagaccggggtctggtggtgacggacatcaaagctgaggatgtggttcttgaacatcgtagctactgctcagcaagggctcgggagagaaactttgctggagaggtcctaggcatatgtcactccat

SEQ ID NO: 16 - DNA, 856 bp, Rat
gaattcggcacgagcggcacgagcggccccgaagggggctgcacgggcgacttggcggcgatggctcgagctccggcggcgacgacggtggccggaggcggcggctcctcctccttctcctcctgggcttgggcccggcggtgatccgagctggcggccgcggcccccckatgagactgttggcgggctggctgtgcctgagcctggcgtccgtgtggctggcgcggargatgtggacgctgcggagcccgctctcccgctctctgtacgtgaacatgactagcggccctggcgggccagcggcggccaccggcggcgggaaggacacgcaccagtggtatgtgtgcaacagagagaaattatgcgaatcacttcagtctgtctttgttcagagttatcttgaccaaggaacacagatcttcttaaacaacagcattgagaaatctggctggctgtttatccaactctatcattcttttgtatcatctgtttttaccctgtttatgtctagaacatctattaacgggttgctaggaagaggctccatgtttgtgttctcaccagatcagtttcagagactgcttaaaattaatccggactggaaaacccatagacttcttgatttaggtgctggagatggagaagtcacgaaaatcatgagccctcattttgaagaaatttatgccactgaactttctgaaacaatgatctggcagctccagaagaagaaatacagagtgcttggtataaatgaatggcagaatacagggttccagtatgatgtcatcagctgcttaaatctgctggatcgctgtgatcagcctctgacattgttaaaagatatcagaatgtcttg

SEQ ID NO: 17 - DNA, 349 bp, Rat
ccaaagaattcggcacgaggcggctcgggatggcggcccccatggaccggacccatggtggccgggcagcccgggcgctgcggcgggctctggcgctggcctcgctggccgggctattgctgagcggcctggcgggtgctctccccaccctcgggcccggctggcggcgccaaaaccccgagccgccggcctcccgcacccgctcgctgctgctggacgccgcttcgggccagctgcgcctggagtacggcttccaccccgatgcggtggcctgggctaacctcaccaacgccatccgcgagactgggtgggcctatctggacctgggcacaaatggcagctacaagtg

SEQ ID NO: 18 - DNA, 1057 bp, Rat
cctgcaggaagggtggcccccagtatcgggtcccccaaaacccttgcgtgaatgacaggtgtacctcccgcagagagtacatggagatcaactgtcccagggctgtagggaaaagcctgtaatgggacactccttcccgctgcaggtcgacactagtggatccaaagaattcggcacgaggcggaagcagccgcaggtatggcggctgccatgccgctgggtttatcgttgctgttgctggtgctagtggggcagggctgctgtggccgcgtggagggcccacgcgacagcctgcgagaggaactcgttatcactccgctgccttccggcgacgtggccgccacattccagttccgcacgcgttgggattccgatctgcagcgggaaggagtgtcccattacaggctcttccctaaagccctgggacagttgatctccaagtactctctgcgggagctacacctgtcattcacgcaaggcttttggaggacccgatactgggggccacccttcctgcaggctccatcaggtgcagagctctgggtctggttccaagacactgtcacagatgtggataagtcttggaaggagctcagtaatgtcctctcagggatcttctgcgcgtccctcaacttcatcgactccaccaataccgtcactcccacagcctccttcaaacctctggggctggccaatgacactgaccactacttcctgcgctatgctgtgctgccccgggaggtcgtctgcaccgagaatctcacgccgtggaagaagctcctgccctgtagctccaaggcagggctgtccgtgctactgaaagcagatcgattgttccacaccagttaccactcccaggcagtgcatatccggccaatctgcagaaatgctcactgcaccagtatctcctgggagctgaggcagaccctttcagttgtctttgatgccttcatcaccggacaggggaagaaagaggcctgtccattggcatctcagagcctagtttatgtggacatcacaggctacagccaggacaacgaaacactggaggtgagca

SEQ ID NO: 19 - DNA, 750 bp, Rat
ggcacgagcggcatctcaagctgctgcaagcaggactgagcactaccagagcagcaacctcggatggccctggacgtggcacgcgcggggcacagaggcaagaagacttgatgaagcctctcttcccaacccatatccagaaagaacgatttagatgacagtttttagaaaggtgaccaccatgatctcctggatgctcttggcctgtgcccttccgtgtgctgctgacccaatgcttggtgcctttgctcgcagggacttccagaagggtggtcctcaactggtgtgcagtctgcctggtccccaaggcccacctggccctccaggagcaccaggatcctcaggaatggtgggaagaatgggttttcctggtaaggatggccaagacggccaggacggagaccgaggggacagtggagaagaaggtccacctggcaggacaggcaaccgaggaaaacaaggaccaaagggcaaagctggggccattgggagagcgggtcctcgaggacccaagggggtcagtggtacccccgggaaacatggtataccgggcaagaagggacctaagggcaagaaaggggaacctgggctcccaggcccctgtagctgcggcagtagccgagccaagtcggccttttcggtggcggtaaccaagagttacccacgtgagcgactgcccatcaagtttgacaagattctgatgaatgagggaggccactacaatgcatccagtggcaagttcgtctgcag

SEQ ID NO: 20 - DNA, 849 bp, Rat
gataatycggsacgaggggccgccgagtcccgccgggtcggtgtagctcgctgccgacgctgcgacgctcgtgggtgccgtgttcggcttttcctgtctacttcagtgcaccgctgcagctccggcctcgggtctgacgcgccacagcatggcttccgctttggaggagttgcagaaagacctagaagaggtcaaagtgctgctggaaaagtccactaggaaaagactacgtgatactcttacaaatgaaaaatccaagattgagacggaactaaggaacaagatgcagcagaagtcacagaagaaaccagaatttgataatgaaaagccagctgctgtggttgctcctcttacaacagggtacactgtgaaaatcagtaattatggatgggatcagtcagataagtttgtgaaaatctacattactttaactggagttcatcaggttcctgctgagaatgtgcaagtacacttcacagagaggtcatttgatcttttggtaaaaaacctcaatggcaagaattactccatgattgtgaacaatcttttgaaacctatctctgtggaaagcagttcaaaaaaagtcaagactgatacagttattatcctatgtagaaagaaagcagaaaacacacgatgggactacttaactcaggtggaaaaagaatgcaaagagaaagaaaagccttcctacgacactgaggcagatcctagtgagggattaatgaatgttctaaagaaaatttatgaagatggagatgatgacatgaagcgaaccattaataaagcgtgggtggaatcccgagagaagcaagccagggaagacacagaattcctgcagcccggggg

SEQ ID NO: 21 - DNA, 312 bp, Human
ttcgagcggccgcccgggcaggtaccagcacatgctgtggtgatgctggtttgtgttcccacctcactcacactcagccctggcatctcctctcctggctctgtttgagtggcagcgtcaatggcctttctgctctggagctcgtccctgtggctgctgaagtagtcttcctcactaacagtagaggactcacagtcatggggcttgcgctctgccttgcctctgcgggcatctctgggtccaggtccgccttcctgggagtacctcggccgcgaccaacgctaatcaagcttatcgataccgtcgacctcg

SEQ ID NO: 22 - DNA, 1023 bp, Mouse
gcgcggcccgggggactcacattccccggtcccccctccgccccacgcggctgggccatggacgccagatggtgggcagtagtggtactcgccacactcccttccttgggagcaggtggagagtcacccgaagcccctccgcagtcctggacacagctgtggctcttccgcttcttgttgaatgtagcgggctatgccagctttatggtacctggctacctcctggtgcagtacttaagacggaagaactacctggagacaggcaggggtctctgcttccccctggtgaaagcctgtgtgtttggcaatgagcccaaggctcctgatgaggttctcctggctccgcggacagagacagcggaatccaccccgtcttggcaggtcctgaagctggtcttctgtgcctcgggtctccaggtgtcctatctgacttggggcatactgcaggaaagagtgatgactggcagctacggggccacagccacatcaccaggagagcatttcacagactcccagtttctggtgctgatgaaccgtgtgctggcgctggttgtggcaggcctctactgtgtcctgcgcaagcagccccgtcatggtgcacccatgtaccggtactcctttgccagtctgtcaaatgtgcttagcagctggtgccagtatgaagcacttaagttcgtcagcttccctacccaggtgctggcgaaggcctccaaggtgatccctgtcatgatgatgggaaagctggtgtcccggcgcagctatgaacactgggaatacctgactgccggcctcatctccattggagtgagcatgtttcttctatccagtggaccagagcctagaagctctccagccaccacactctctggcttggtcctactggcaggctatattgctttcgacagcttcacctcaaattggcaggatgccctgtttgcctataagatgtcatcggtgcagatgatgtttggggtcaatttattctcctgtcttttcacagtaggctcactactggaacagggg

SEQ ID NO: 23 - DNA, 997 bp, Mouse
ggcacgaggacttctgctagtacttgctcctggcggtggctgagcaaccggtctcaccagcatgctctgcctgtgcctgtatgtgcccatcgccggggcggctcagactgagttccagtactttgagtccaaggggcttcctgccgagctgaaatccatcttcaaactcagtgtctttatcccctctcaagagttctccacataccgccaatggaagcagaaaattgtgcaagcaggtgacaaggaccttgatgggcaactggactttgaagagtttgtacattacctccaagatcatgagaaaaaactgaggctggtgttcaagagtctggacaaaaagaatgatggtcgaatcgatgctcaggagatcatgcagtccctgcgggacctgggtgtcaagatctcggaacagcaggcggagaagattcttaagagcatggataagaatggcacgatgaccatcgactggaacgagtggagggactaccacctcctgcaccctgtggagaacatcccggagatcatcctgtactggaagcactcgacgatcttcgatgtcggtgagaatctgacagtcccagatgagttcacagtggaggagaggcagacggggatgtggtggaggcacctggtggcaggaggtggggcaggggcagtttccagaacctgcactgcccccctggacagactgaaggtgctcatgcaggtccatgcctcccgcagcaacaacatgtgcatcgtaggtggattcacacagatgattcgagaagggggagccaagtcactctggcggggcaacggcatcaatgtcctcaaaattgcccctgagtcggccatcaaattcatggcatatgagcagatgaaacggcttgtcggtagtgatcaggagacgctgaggatccacgaaaggcttgtggcaggctccttggccggagccattgcccagagtagcatctacccaatggaggttctgaagacccgaatggccctgcggaaa

SEQ ID NO: 24 - DNA, 529 bp, Rat
aaagcttccatcctcaacatgccactagtgacgacactcttctacgcctgcttctatcactacacggagtccgaggggaccttcagcagtccagtcaacctgaagaaaacattcaagatcccagacagacagtatgtgctgacagccttggctgcgcgggccaagcttagagcctggaatgatgtcgacgccttgttcaccacaaagaactggttgggttacaccaagaagagagcacccattggcttccatcgagttgtggaaattttgcacaagaacagtgcccctgtccagatattgcaggaatatgtcaatctggtggaagatgtggacacaaagttgaacttagccactaagttcaagtgccatgatgttgtcattgatacttgccgagacctgaaggatcgtcaacagttgcttgcatacaggagcaaagtagataaaggatctgctgaggaagagaaaatcgatgtcatcctcagcagctcgcaaattcgatggaagaactaaggttcttttgctacccaga

SEQ ID NO: 25 - DNA, 1230 bp, Rat
aagaattcggcacgaggccatggctggttgggcgggggccgagctctcggtcctgaacccgctgcgtgcgctgtggctgttgctggccgccgccttcctgctcgcactgctgctgcagctggcgcccgccaggctgctaccgagctgcgcgctcttccaggacctcatccgctacgggaagaccaagcagtccggctcgcggcgccccgccgtctgcagggccttcgacgtccccaagaggtacttttctcacttctacgtcgtctcagtgttatggaatggctccctgctctggttcctgtctcagtctctgttcctgggagcgccgtttccaagctggctttgggctttgctcagaactcttggggtcacgcagttccaagccctggggatggagtccaaggcttctcggatacaagcaggcgagctggctctgtctaccttcttagtgttggtgttcctctgggtccatagtcttcggagactcttcgagtgcttctacgtcagcgtcttctctaacacggccattcacgtcgtgcagtactgtttcgggctggtctactatgtccttgttggcctgaccgtactgagccaagtgcccatgaatgacaagaacgtgtacgctctggggaagaatctactgctacaagctcggtggttccacatcttgggaatgatgatgttcttctggtcctctgcccatcagtataagtgccacgtcattctcagcaatctcaggagaaataagaaaggtgtggtcatccactgccagcacagaatcccctttggagactggttcgagtatgtgtcttctgctaactacctagcagagctgatgatctacatctccatggctgtcaccttcgggctccacaacgtaacctggtggctggtggtgacctatgtcttcttcagccaagccttgtctgcgttcttcaaccacaggttctacaaaagcacatttgtgtcctacccaaagcataggaaagctttcctcccgttcttgttttgaacaggctttatggtgaagagcgcagcccaggtgacaggttcccttcctcgagacgctgagacaggctgaagtacactttctgcagctggcgcccgccaggctgctaccgagctgcgcgctcttccaggacctcatccgctacgggaagaccaagcagtccggctcgcggcgccccgccgtctgcagcccgggggatccactagttctagagcgccgcc

SEQ ID NO: 26 - DNA, 393 bp, Rat
ggcagcaagaagcaacccgcaagctaggagtctgtcagcgagggcaggggctgcctggttggggtaggagtgggagcagggccagcaggagggtctgaggaagccattcaaagcgagcagctgggagagctggggagccgggaagggcctacagactacaagagaggatcctggcgtctgggcctcctgggtcatcaccatgaggccacttcttgccctgctgcttctgggtctggcatcaggctctcctcctctggacgacaacaagatccccagcctgtgtcccgggcagcccggcctcccaggcacaccaggccaccacggcagccaaggcctgcctggccgtgacggcctgatggccgcgacggtgcacccggagtccgggagagaaac

SEQ ID NO: 27 - DNA, 778 bp, Rat
ctgcaggtcgacactagtggatccaaagattcggcacgagataaggcacatttgcttcataaaataaaaaaaaaggaaatttacttagccgcatgtcagtcacccaaattttgagtgtacaaatgaaatggaaaacatttattacacaaatttaattacaattctagggaataaacatgcaaatcagatggagctcaatctgcaggcgctgatcctctccccctggtttgcagtctgtgcacctcctggattcgcccgcgaccaggcagtcagaggcctggctcttgcaggcaggaggatcactgttgtaaagaacagcgtcacatttagcgcatctggcgtagtagcagtttttaacactttgcgcaggtgcctcccttcccccacccgcgctttgttaggtctacctctctaaatctctgccttcctcgcacagtaagtgacctctccatgacaaagggcccccagacagcagttataaatcaatgtgttttgggtttgtttgtttgtttgttttgttttaaagaaaaacccggccatgcttggtggcacttgcctttaatagtagcgcttggtagacagaggcaagcggttctctgtaagttcaaggccagcctggtctacacagtgagaccgggtctcaaaaacaaaacaacaaaaaacaactcctattgaatccactacaggaagggggggcgcggatcactgtctgcaaactaaagtgacttgagctcctgtcacagcctttccagcaagggcaagcttctttattagttat

SEQ ID NO: 28 - DNA, 1123 bp, Rat
gggccccccctcgagtcgacgktatcgataagcttgatatcgaattcctgcaggtcgacactagtggatccaaagaattcggcacgagcctgaggcgactacggtgcgggtgccgggtgccgggtgcctacagcccccatcagcttccccggggagattctgccgatttgtcacgagccatgctcaggaggcagctcgtctggtggcacctgctggctttgcttttcctcccattttgcctgtgtcaagatgaatacatggagtctccacaagctggaggactgcccccagactgcagcaagtgttgccatggagattatggattccgtggttaccaagggccccctggacccccaggtcctcctggcattccaggaaaccatggaaacaatggaaataacggagccactggccacgaaggggccaagggtgagaaaggagacaaaggcgacctggggcctcgaggggaacgggggcagcatggccccaaaggatagaagggatacccaggggtgccaccagagctgcagattgcgttcatggcttctctagcgactcacttcagcaatcagaacagtggcattatcttcagcagtgttgagaccaacattggaaacttcttcgatgtcatgactggtagatttggggcccccgtatcaggcgtgtatttcttcaccttcagcatgatgaagcatgaggacgtggaggaagtgtatgtgtaccttatgcacaatggtaacacggtgttcagcatgtacagctatgaaacaaagggaaaatcagatacatccagcaaccatgcagtgctgaagttggccaaaggagatgaagtctggctaagaatgggcaacggtgccctccatggggaccaccagcgcttctctaccttcgcaggctttctgctttttgaaactaagtgatgaggaagtcaggatagctccatgctaagggcgatttgtaggtgagctagggttgttaggatctgaggggtgttggagttgggcttctctatggagtatttaactgttacattggtcacactgctactcattctaatggcataccaattatgttggatactttaggggctaggaagaatagaccacaaggtaatattcccaga

SEQ ID NO: 29 - DNA, 849 bp, Rat
aattcggcacgaggtgccctccgccgggtcgggatggagctgcctgccgtgaacttgaaggttattctcctggttcactggctgttgacaacctggggctgcttggcgttctcaggctcctatgcttggggcaacttcactatcctggccctgggtgctgtgggctgtggcccagcgggactctgttgatgccattggcatgtttcttggtggcttggttgccaccatcttcctggacattatctacattagcatcttctactcaagcgttgccgttggggacactggccgcttcagtgccggcatggccatcttcagcttgctgctgcaagcccttctcctgctgcctcgtctaccacatgcaccgggcagcgagggggtgagctcccgctccgctcggatttcttcggaccttctcaggaacatagtgcctaccagacaattgactcgtcagactcacctgcagacccccttgcaagcctggagaacaagggccaagctgccccccgggggtactgaagctgtccctggccgtcctggggcccagcaggatgcttgtcaccttctttactggacctacaatggggtatcctccattccctgccacagaggtggcctgagtcatgtgccctcggaggtcccagctgagaagagcccagtcctaattctccatgctgcccctccattcaagacacctgttaacccctgggctagaactgtggttggtttcttcccctcctccccatcactataacacacaaccgccgagctgtgcagagtgttcagggccatccaggccttatgggccaatgatcactgcctctcaggctaccccaaggtgacccagcc

SEQ ID NO: 30 - DNA, 1015 bp, Rat
gaattcggcacgagggagcaagaagcaacccgaagctaggagtctgtcagcgagggcaggggctgcctggttggggtaggagtgggagcagggccagcaggagggtctgaggaagccattcaaagcgagcagctgggagagctggggagccgggaagggcctacagactacaagagaggatcctggcgtctgggcctcctgggtcatcaccatgaggccacttcttgccctgctgcttctgggtctggcatcaggctctcctcctctggacgacaacaagatccccagcctgtgtcccgggcagcccggcctcccaggcacaccaggccaccacggcagccaaggcctgcctggccgtgacggccgtgatggccgcgacggtgcacccggagctccgggagagaaaggcgagggcgggagaccgggactacctgggccacgtggggagcccgggccgcgtggagaggcaggacctgtgggggctatcgggcctgcgggggagtgctcggtgcccccacgatcagccttcagtgccaagcgatcagagagccgggtacctccgccagccgacacacccctacccttcgaccgtgtgctgctcaatgagcagggacattacgatgccactaccggcaagttcacctgccaagtgcctggtgtctactactttgctgtccatgccactgtctaccgggccagcctacagtttgatcttgtcaaaaatggccaatccatagcttctttcttccagttttttggggggtggccaaagccagcctcgctctcagggggtgcgatggtgaggctagaacctgaggaccaggtatgggttcaggtgggtgtgggtgattacattggcatctatgccagcatcaaaacagacagtaccttctctggatttctcgtctattctgactggcacagctccccagtcttcgcttaaaatacagtgaacccggagctggcacttgctcctagtggagggtgtgacattggtccagcgcgcataccagga

SEQ ID NO: 31 - DNA, 452 bp, Human
ttcgagcggccgcccgggcaggttgaaactttagaaagaagagccgggaggatgtattggttgttaggaaaatgtaggctaccagtagaaaatgacattctctattaataagatctgaggtgcgacacacataattgtcccaatttttaagattgatggggagcatgaagcatttttttaatgtgttggcaggccccattaaatgcataaactgcataggactcatgtggtctgaatgtattttagggctttctgggaattgtcttgacagagaacctcagctggacaaagcagccttgatctgagtgagctaactgacacaatgaaactgtcaggcatgtttctgctcctctctctggctcttttctgctttttaacaggtgtcttcagtcagggaggacaggttgactgtggtgagtccaggacaccaaggcctactgcactcgggaacc

SEQ ID NO: 32 - DNA, 434 bp, Mouse
accaccaagcagatggaatgctggcacacccatgcacctgcatggcgtcacaggtggaagattgttaaaaaattgacatcagaaatatttacagaaatagatacctgtttgaataaagttagagatgaaatttttgctaaacttcaaccgaagcttagatgcacattaggtgacatggaaagtcctgtgtttgcacttcctgtactgttaaagcttgaaccccatgttgaaagcctctttacatattctttttcttggaattttgaatgttcccattgtggacaccagtaccaaaacaggtgtgtgaagagtctggtcacctttaccaatattgttcctgagtggcatccactcaatgctgcccattttggtccatgtaacagctgcaacagtaaatcacaaataagaaaaatggtgttggaaagagcgtcgcc

SEQ ID NO: 33 - DNA, 903 bp, Mouse
ctgcaacaaggctgttggttcctctccaatgggctccagtgaagggctcctgggcctgggccctgggcccaatggtcacagtcacctgctgaagaccccactgggtggccagaaacgcagtttttcccacctgctgccctcacctgagcccagcccagagggcagctacgtgggccagcactcccagggcctcggcggccactacgcggactcctacctgaagcggaagaggattttctaaggggtcgacaccagagatgctccaagggcctgcaccaagttgcttttgggttttttctggtatttgtgttttctgggattttatttttattattttttttaatgtcctttctttgggtaatagagaaatctctgcaaaagactttgctgaccaaccagctggagctcaaggaatgtggggtatctggggccacaccattacctgtgggcttgctcctggagccaaaccctgcagccttaagagagaggggcctgacctgctctctttccctccctagctccaggcctcctctcctgcctcgtcactcctgtgttctggcctcttgagtgcctttggaggtgtctctgacctgtgaggatcagagacagtccccgtttttaaacttcgacaattgacttttatttccttttctaatttttattattttttaaaacaaccaggatgattatcacatctactcccccatccgtccagaaaagccccaaattgattccttcagggtctggcctgcccaggctctattccacatgtgcaggttccaacagcttaaccctattctcttcccagtcatctgctgcaggtatagctgtctcatgcccctgcctgcctattctggccagtaccctaagccccaagatctccagcccctgccccagtatcct

SEQ ID NO: 34 - DNA, 1359 bp, Mouse
  misc_feature (1)...(1359): n = A,T,C or G
caaagaattcggcacgagaccggcctcactatgtctgccattttcaattttcagagtctgttgactgtaatcttgctgcttatatgtacatgtgcttatatccgatccctggcacccagcatcctggacagaaataaaactggactattgggaatattttggaagtgtgcccgaattggggaacgcaagagtccttatgtcgccatatgctgtatagtgatggccttcagcatcctcttcatacagtagctttggaaactaccagcatgtgcttgctatcagactgtaaacaaggacttgcctccagaaaataatgggaagaatggttaagccatttgtctctgaacatggaatgagataaacttcaagatgctgttctctatttttatgctattggaccaatgagctgaatgaataattaagatgtaacagttcaatacacaggaatgtgattgtatccatcaacctcagttctctcactccagtattacattctgcaaatgtcattctgttgtgtcaggactgcttttcataaggttcttcgggcacgaagtagaaacccagtggcaaattccaaggctcctttgactagggcttcaaaataatgtcttcacagaatggtacctctagcgactgtcctattnttattgagaaaaaaacttgttctatttttgttgttgttactgttcttatggattgcattcatatttaaaccctttggattgctaaccagagtacctctattcttggcaaattccgcagtttattacaggtgtttaaagtattttaaacaaaactctgaatttctttagttagcctaagagttggcttctagtcacaaagatacagctgccacactgtgacgaagagcaccttagaaagaaaagcagcaagtgagcggtgagcaagtaagcaccgtgcagtcttcgtgcaagtaagcaccgtgcagtcttcgttctctgtagtcttgtcttccaaatagaacgtccatcgtagttacccaaaggtggtatttgtggtgttcttaatgcagtgctttaagtctagtgtatgttctgtcagcttgaactggaatctctcttgtaactttgtaggttataaacatatctcatatctgctttagtctgggtactatgctctaagtacatttcagctttgacacagaatgtgaatagacgaatatcaaaggatacttacaagtttgtatccaacatttcttcaggttcagctgaaaatcagttactgtttcaaaacaaagaggaattaaatcctagctgaaaactatacatagcatttattaattaattactgggtttaactgctctttttaaaagtttgaaaaaaaaaaaaaaaaactcg

SEQ ID NO: 35 - DNA, 797 bp, Mouse
aattcggcacgaggctagtcgaatgtccgggctgcggacgctgctggggctggggctgctggttgcgggctcgcgcctgccacgggtcatcagccagcagagtgtgtgtcgtgcaaggcccatctggtggggaacacagcgccggggctcggagaccatggcgggcgctgcggtgaagtacttaagtcaggaggaggctcaggccgtggaccaagagctttttaacgagtatcagttcagcgtggatcaactcatggagctggccgggttgagctgtgccacggctattgccaaggcttatccccccacgtctatgtccaagagtcccccgactgtcttggtcatctgtggccccggaaataacggaggggatgggctggtctgtgcgcgacacctcaaactttttggttaccagccaactatctattaccccaaaagacctaacaagcccctcttcactgggctagtgactcagtgtcagaaaatggacattcctttccttggtgaaatgcccccagaggatgggatgtagagaagggaaaccctagcggaatccaaccagacttactcatctcactgacggcacccaagaagtctgcaactcactttactggccgatatcattaccttgggggtcgctttgtaccacctgctctagagaagaagtaccagctgaacctgccatcttaccctgacacagagtgtgtctaccgtctacagtaagggaggtgggtaggcaggattctcaataaagacttggtactttctgtcttgaaaaaaaaaaaaaaaaaaactcg

SEQ ID NO: 36 - DNA, 896 bp, Mouse
ttaaggttttcagactttatttcatggtatttgacattgacacatactgagttagtaacaagataccatgcagctccctctagcctcggatcaccgaagcaggaagaaggtcagactgcccccatcccagatttgcttagtttgtctcccaatgtgctggactttaaagacagggaatggagaagcagatggatgcttcagtttcagtcatttttggctctatagtgatctctgccttcctgtacctgtccttggctggaccctgggcagtaactgtcactcagatgaggacgatcatcattacaatggaccaactgagggatgccctcatattagaccaattaaaagttgctgtgagttaaaccaggaatgaccgcacttccacatcagaaatcaaacaaaatcaatggttgaagaacatggttaggagcctggctaggtatctttgagagatggatgcagctggctactcaggcaggtaagcaatggaggtcagccacaccctatcgtgatgcactccccatgttcagggtaactgaagaagtgggtaaggccagctgaaggccagtcagggcaacttagatgtagcctggcttctacttccagcctccggggacaggcaaacacattttgggaagtaagatgatgtcccaattattatcagttttttgatatcacagtattgtcacagggagcactgggggtccaggctagcctggggtgaggctggccctcagcacacacaggagagcagcttaagtgggacctaaaaaggacccaatgttacttggtttaatgaaggccccctcaaccccaacagcccctcctgctcagggacacagttctcacccaattacacattaataacacacaaacagtgcctagcaatgggccag

SEQ ID NO: 37 - DNA, 501 bp, Mouse
ctgcaggtcgacactagtggatccaaagaattcggcacgagaatcatggcgccgtcgctgtggaaggggcttgtaggtgtcgggctttttgccctagcccacgctgccttttcagctgcgcagcatcgttcttatatgcgactaacagaaaaggaagatgaatcattaccaatagatatagttcttcagacacttctggcctttgcagttacctgttatggcatagttcatatcgcaggggagttcaaagacatggatgccacttcagaattaaagaataagacatttgataccttaaggaatcacccatctttttatgtgtttaaccatcgtggtcgagtgctgttccggccttcagatgcaacaaattcttcaaacctagatgcattgtcctctaatacatcgttgaagttacgaaagtttgactcactgcgccgttaagctttttacaaattaaataacaggacagacacagaattgagtattggagtttggggtgta

SEQ ID NO: 38 - DNA, 766 bp, Mouse
gcagcacccagcgccaagcgcaccaggcaccgcgacagacggcaggagcacccatcgacgggcgtactggagcgagccgagcagagcagagagaggcgtgcttgaaaccgagaaccaagccgggcggcatcccccggccgccgcacgcacaggccggcgccctccttgcctccctgctccccaccgcgcccctccggccagcatgaggctcctggcggccgcgctgctcctgctgctcctggcgctgtgcgcctcgcgcgtggacgggtccaagtgtaagtgttcccggaaggggcccaagatccgctacagcgacgtgaagaagctggaaatgaagccaaagtacccacactgcgaggagaagatggttatcgtcaccaccaaagagcatgtccaaggtaccggggccaggagcactgcctgcaccctaagctgcagagcaccaaacgcttcatcaagtggtacaatgcctggaacgagaagcgcagggtctacgaagaatagggtggacgatcatggaaagaaaaactccaggccagttgagagacttcagcagaggactttgcagattaaaataaaagccctttctttctcacaagcataagacaaattatatattgctatgaagctcttcttaccagggtcagtttttacattttatagctgtgtgtgaaaggcttccagatgtgagatccagctcgcctgcgcaccagacttcattacaagtggctttttgctgggcggttggcggggggcggggggacct

SEQ ID NO: 39 - DNA, 480 bp, Mouse
ggcacgaggaagcctcttcccatggaagcacactctaggagagagaaggcctctgggctccgcctggcctggcattatgaatgcagtggggtcagtgtgtggtggatgtgtgtactgggttggctttcctttttagtttttttactttttagtttagtttgttcttttccttccccaataaatcattctcacatgcttccatgtttgtttctgagaggtgggggctcaaatgtatagaaagtaggccccagtccataaggaggtgtgaacacacccccttactgcttatcacccatttgacaggaacgcccaggaggggagggggaggggaagaggtgagttctgcacagtcggacatttctgttgcttttgcatgtttaatatagacgttcctgtcgatccttgggagatcatggccttcagatatgcacacgacctttgaattgtgcctactaattatagcaggggacttgggtaccc

SEQ ID NO: 40 - DNA, 962 bp, Mouse
ggcacgagattagcggctcctcagcccagcaaatcctccactcatcatgcttcctcctgccattcatctctctctcattcccctgctctgcatcctgatgagaaactgtttggcttttaaaaatgatgccacagaaatcctttattcacatgtggttaaacctgtcccggcacaccccagcagcaacagcaccctgaatcaagccaggaatggaggcaggcatttcagtagcactggactggatcgaaacagtcgagttcaagtgggctgcagggaactgcggtccaccaaatacatttcggacggccagtgcaccagcatcagccctctgaaggagctggtgtgcgcgggcgagtgcttgcccctgccggtgcttcccaactggatcggaggaggctacggaacaaagtactggagccggaggagctctcaggagtggcggtgtgtcaacgacaagacgcgcacccagaggatccagctgcagtgtcaggacggcagcacgcgcacctacaaaatcaccgtggtcacggcgtgcaagtgcaagaggtacacccgtcagcacaacgagtccagccacaactttgaaagcgtgtcgccagccaagcccgcccagcaccacagagagcggaagagagccagcaaatccagcaagcacagtctgagctagacctggactgactaggaagcatctgctacccagatttgattgcttggaagactctctctcgagcctgccattgctctttcctcacttgaaagtatatgctttctgctttgatcaagcccagcaggctgtccttctctgggactagcttttcctttgcaagtgtctcaagatgtaatgagtggtttgcagtgaaagccaggcatcctgtagtttccatcccctcccccatcccagtcatttctttaaaagcacctgatgctgcattctgttacagtttaaaaaaaaaaaaaaaaaa

SEQ ID NO: 41 - DNA, 794 bp, Mouse
ggcacgaggctagtcgaatgtccgggctgcggacgctgctggggctggggctgctggttgcgggctcgcgcctgccacgggtcatcagccagcagagtgtgtgtcgtgcaaggcccatctggtggggaacacagcgccggggctcggagaccatggcgggcgctgcggtgaagtacttaagtcaggaggaggctcaggccgtggaccaagagctttttaacgagtatcagttcagcgtggatcaactcatggagctggccgggttgagctgtgccacggctattgccaaggcttatccccccacgtctatgtccaagagtcccccgactgtcttggtcatctgtggccccggaaataacggaggggatgggctggtctgtgcgcgacacctcaaactttttggttaccagccaactatctattaccccaaaagacctaacaagcccctcttcactgggctagtgactcagtgtcagaaaatggacattcctttccttggtgaaatgcccccagaggatgggatgtagagaagggaaaccctagcggaatccaaccagacttactcatctcactgacggcacccaagaagtctgcaactcactttactggccgatatcattaccttgggggtcgctttgtaccacctgctctagagaagaagtaccagctgaacctgccatcttaccctgacacagagtgtgtctaccgtctacagtaagggaggtgggtaggcaggattctcaataaagacttggtactttctgtcttgaaaaaaaaaaaaaaaaaaactcgag

SEQ ID NO: 42 - DNA, 1152 bp, Mouse
ggcacgagcttctcagggcctgccacccaaataagtctggccctagcctcaactctctctcaggctgggccacaggaagctgctgactggccacttgacaccctccccctaaagctaatgtctgtgactatagggaggttagcactttttctaattggaattcttctctgtcctgtggccccatccctcacccgctcttggcctggaccagatacatgcagcctctttctccagcacagcctttccctgagcctgaggttagggcagagtttagagggtgggctaagtgtatgttttcatgtatgcattcatgcctgtgagtgtgtggcttgctgtcgtgtcctctgggatcccaagccacgcgggtcttccctctgtagatgggtcctgggttctatcacctgcttatttatgtacgaggttggggggtggacccagggtgggttgattgtctctttgtaaggaagtatgtgtcgggggtgacacgaggctaagcccgagaaaccccgggagacagcactgcataagaaactggtttccmagactgcagagggagctgcacttttgttttgaccaaaaacaaaaaacaaaacaaaacaaaaacaaaacaaaaataactctgaagggcgggaggatacccaagcctgatgcctgagaggagtccctagacttcagcaactccgctgcgtggcctgagcccagcgggagggatggggagagaattttttggagtccgtgcctgtggtgggcagtcctgagccttcagctgaagcagtgctttttggctgccctcacctcgcactacttgaccttgaggctctgagtatctcctgtgcacaggagaagctcctgcaccagaaagcaccaaarsccmtggcaccccatcttactccactctccccagggactcccaggtgggaactgctgtggcagtgagctcagcccggacagacactgccaaccctgtctcctggcattgggctccggctctacctccccaagcagggcgaggccccgccttctcagcctagcaccacctgtccccgagtcttctcagcttgcccatcattctcggcgcccacacaggtgacagtcccaagtagataacctccatgggacaagttgggtgttgccttacccgcctgcccagcc

SEQ ID NO: 43 - DNA, 446 bp, Mouse
ggcacgagcttgagtctggagtgctgcaaataatagtatgcactatccctgcctggcatgtttgtttgttaatgtgcactggtgttttgcctggatgtgtatacttgtgaagatgtcagaactcctggagctggagttagagacaatggtgagctgccttgtggatgttgggaattgaacccaggtcctctggagaaataaccagtgctcttaaccactaagccatctcaacagccccaaattatttttttaataagttgcctcggtcatgttgtcttaatcagagcgatagaaaagtaactaatatagattatttatgaattcaggtggcttaatggtatatgcatgaattagtagtaaaacaagaactagggccagcaagtggcttaagggtgcctgctaaccatctcagccacctgagttcagtctccaggaaccacacagtg

SEQ ID NO: 44 - DNA, 391 bp, Mouse
ggcacgagcccacgtctatgttcaccttcgttgttctggtaatcaccatcgtcatctgtctctgccacgtctgctttggacacttcaaatacctcagtgcccacaactacaagattgaacacacagagacagatgccgtgagctccagaagtaatggacggccccccactgctggcgctgtccccaaatctgcgaaatacatcgctcaggtgctgcaggactcagagggggacggggacggagatggggctcctgggagctcaggcgatgagcccccatcgtcctcctcccaagacgaggagttgctgatgcctcctgatggcctcacggacacagacttccagtcatgcgaggacagcctcatagagaatgagattcaccagtaaggggt

SEQ ID NO: 45 - DNA, 516 bp, Rat
cctcctgtctctgctgctacttgtgaggcctgcgcctgtggtggcctactctgtgtccctcccggcctccttcctggaggaagtggcgggcagtggggaagctgagggttcttcagcctcttccccaagcctgctgccgccccggactccagccttcagtcccacaccagggaggacccagcccacagctccggtcggccctgtgccacccaccaacctcctggatgggatcgtggacttcttccgccagtatgtgatgctcattgcggtggtgggctcgctgacctttctcatcatgttcatagtctgcgcggcactcatcacgcgccagaagcacaaggccacagcctactacccgtcctctttccccgaaaagaagtatgtggaccagagagaccgggctggggggccccatgccttcagcgaggtccctgacagggcacctgacagccggcaggaagagggcctggacttcttccagcagctccaggctgacattctggcttgctactcaga

SEQ ID NO: 46 - DNA, 306 bp, Mouse
gtcaccagcaaaggtggaaacaaattctttgaaggactctgacagccctgggtctccaaggctgctgggaccagtcttagcctcttgtggcaagtggtaggaatgtgaatctttgcgaccagggggatcagaaatggggtctcccatttctggtgtctgcccagtccttccaggtgggctcttcgtagccctggggtggattttcctcctcttccacagagatgctttttctctgcataccatgtctgctggtttcccaaaatctcccgcaaacccacaccaccctccactgaggctcagccccag

SEQ ID NO: 47 - DNA, 439 bp, Mouse
gaaaactcgcaggacgctcactggacagcttgggcttttttcagttgattttatggtttgcatctttctctttctctttttctgtttcttgttcccctttccccttttcctggtgagaaagcacatattactgagccattgcaagcaatgggaggggtccacaatgacacacacacacacacacacacacatacacatacacacacccccgagacagtgccagagctaacagcctacatgtgtattttggccaaacttggaaaataggtttccttcttcgttttgcttccagccttttatttgcaagtgatcttccatgcagtatgaaacatgcagacagcactggagtgtggcaagagtgagcttgccccacaagtctctcggggatgttgtactcttgtgtgtgtttacagtatcatggctgttacatctactggtc

SEQ ID NO: 48 - DNA, 159 bp, Mouse
  misc_feature (1)...(159): n = A,T,C or G
cangtacgctcactggaacagcttgggcttttttcagttgattttatggtttgcatctttctctttctctttttctgtttcttgttcccctttccccttttcctggtgagaaagcacatattactgagccattgcaagcaatgggaggggtccacaatg

SEQ ID NO: 49 - DNA, 465 bp, Rat
gtgccctccgccgggtcgggatggagctgcctgccgtgaacttgaaggttattctcctggttcactggctgttgacaacctggggctgcttggcgttctcaggctcctatgcttggggcaacttcactatcctggccctgggtgctgtgggctgtggcccagcgggactctgttgatgccattggcatgtttcttggtggcttggttgccaccatcttcctggacattatctacattagcatcttctactcaagcgttgccgttggggacactggccgcttcagtgccggcatggccatcttcagcttgctgctgcaagcccttctcctgctgcctcgtctaccacatgcaccgggcagcgagggggtgagctcccgctccgctcggatttcttcggaccttctcaggaacatagtgcctaccagacaattgactcgtcagactcacctgcagacccccttgcaa

SEQ ID NO: 50 - DNA, 337 bp, Rat
  misc_feature (1)...(337): n = A,T,C or G
ctcgtgccgaaatcggcagagcgtcgctcctgtgctgtgggnctaagctggncgnctgtggnatcgtcctcagcgnctggggagtgatcatgttgataatgctcgggatatttttcaatgtccattctgctgtggtaatttagnatgtccccttcacagagaaagattttnagaacggccctcagaacatatacaacctgtacgagcaagtcagctacaactgtttcatcgccgcgggcctctacctcctcctcgggggcttctccttctgcnaagttcgtctcaataagcgcaaggaatacatggtgcgctagagcgnagtccnactctccccatt

SEQ ID NO: 51 - DNA, 371 bp, Rat
  misc_feature (1)...(371): n = A,T,C or G
gatgcgccctggagccgactgggctgcggtctgcgctttgtggccttcctggcgaccgagctgctccctcccttccagcnggcgaattcagcccgacgagctgtggctttaccggaacccgtacgtgaaggcggaatacttccccaccggccccatgtttgtcattgcctttctcaccccactgtccctgatcttcttcgccaagtttctgaggaaagctgacgccgaccgacagcgagcaagcctgcctcgctgccagccttgccctagcgctaaatggtgtctttaccaacatcataagactgatagtgngcaaggncacgcccaaattgcttctaccgagtgttccccgnncgggattgcccattctt

SEQ ID NO: 52 - DNA, 228 bp, Rat
ttccgcgggcgtcatgacggctgcggtgttctttggttgcgccttcatcgccttcgggcccgcgctctccctttacgtcttcaccatcgccactgatcctttgcgagtcatcttcctcatcgccggtgccttcttctggttggtgtctctgctgctttcgtctgttttctggttcctagtgagagtcatcactgacaacagagatggaccagtacagaattacctgct

SEQ ID NO: 53 - DNA, 361 bp, Human
cgtggacactgctgaggaatgataccgagtggtaggtcagaagaagatgctgtgaacaccaggactttaatcttatgcttgaaaatgccagatgttgttcgggggacaacttgtatctttctagcagcagatctgtagtttgtatagcctcaacaacaattttaaataagatggagaataaattattgaggggactaggctatatgcatttgccttcatccacccatgtttattaagaatcattgtgcttaataataccaagactaagcaccataaccaagaaatactaatgtaaagattgtttcttgtttcaggaatggttaattcttcaacgttggtatgataatgataacttgttttg

SEQ ID NO: 54 - DNA, 403 bp, Human
ttgcgtggtcgcggccgaggtgtctgttcccaggagtccttcggcggctgttgtgtcagtggcctgatcgcgatggggacaaaggcgcaagtcgagaggaaactgttgtgtctcttcatattggcgatcctgttgtgctccctggcattgggcagtgttacagtgcactcttctgaacctgaagtcagaattcctgagaataatcctgtgaagttgtcctgtgcctactcgggcttttcttctccccgtgtggagtggaagtttgaccaaggagacaccaccagactcgtttgctataataacaagatcacagcttcctatgaggaccgggtgaccttcttgccaactggtatcaccttcaagtccgtgacacgggaagacactgggacatacacttgtatgg

SEQ ID NO: 55 - DNA, 413 bp, Human
tagcgtggtcgcggccgaggtacgactcggtgctcgccctgtccgcggccttgcaggccactcgagccctaatggtggtctccctggtgctgggcttcctggccatgtttgtggccacgatgggcatgaagtgcacgcgctgtgggggagacgacaaagtgaagaaggcccgtatagccatgggtggaggcataattttcatcgtggcaggtcttgccgccttggtagcttgctcctggtatggccatcagattgtcacagacttttataaccctttgatccctaccaacattaagtatgagtttggccctgccatctttattggctgggcagggtctgccctagtcatcctgggaggtgcactgtctcctgttcctgtcctggggataagagcagggctgggtacctgcccg

SEQ ID NO: 56 - DNA, 452 bp, Human; identical to SEQ ID NO: 31

SEQ ID NO: 57 - DNA, 190 bp, Rat
  misc_feature (1)...(190): n = A,T,C or G
ttcgcggcccngtcgacggcattggcaaatagtcaaacctgggaagtaaaaagcaaaaccaaaaacaaaaccaaagaaacaaactaaaacaaaacaagaaaaaccaacatttcttcaattcagtgtgcaacatatataaaacagaaatactaactctacaggcagtatgtcgacgcggccgcgtattcgg

SEQ ID NO: 58 - DNA, 413 bp, Mouse
ctgcaacaaggctgttggttcctctccaatgggctccagtgaagggctcctgggcctgggccctgggcccaatggtcacagtcacctgctgaagaccccactgggtggccagaaacgcagtttttcccacctgctgccctcacctgagcccagcccagagggcagctacgtgggccagcactcccagggcctcggcggccactacgcggactcctacctgaagcggaagaggattttctaaggggtcgacaccagagatgctccaagggcctgcaccaagttgcttttgggttttttctggtatttgtgttttctgggattttatttttattattttttttaatgtcctttctttgggtaatagagaaatctctgcaaaagactttgctgaccaaccagctggagctcaagga

SEQ ID NO: 59 - DNA, 325 bp, Mouse
  misc_feature (1)...(325): n = A,T,C or G
ggtatcacccaggcccacttatccatctacagcgagtagtatggcggccttccttgtaacaggctttttcttttctctcttcgtggtgcttgggatggaacccagggctttgtttaggcctgacaaggctctgcccctgagctgtgccaagcccacctccctctgtgtacaaagctcctttcttgggtgaccaacatcttcctgtctttgagnaaccaggggncagnatgggagccacccagnagttaattaaaccaggttcatcgggagtttgctgaaatgttaagcatactctgttctagagagggagtgaagaaaggggcca

SEQ ID NO: 60 - DNA, 372 bp, Mouse
ggccagcaggaccgcggtcatgagcctctgcaggtgtcaacaaggctcaaggagcaggatggatctcgatgtggttaacatgtttgtgattgcgggtgggaccctggccattccaatcctggcatttgttgcgtctttcctcctgtggccttcagcactgataagaatctattattggtactggcggaggacactgggcatgcaagttcgctacgcacaccatgaggactatcagttctgttactccttccggggcaggccaggacacaagccatccatccttatgctccatggattctccgcacacaaaggacatgtggctcagcgtggccaagttccttcccgaaagaacctgcactttggctgtgtgga

SEQ ID NO: 61 - DNA, 363 bp, Mouse
  misc_feature (1)...(363): n = A,T,C or G
gggcgcgcaggcggnaccggtggcggcggggctgctgctggctaattggcacaggactgcgggccgcgacatggactgtcctgtgcagcccgaattccagcctcgttgtagccaggcacaccaagagctttccaccaaagaagcccctccaagcactgaccatgtctattatggaccacagccccaccaccggggtggtaacggtcattgtcatcctcatcgccatagctgccctggggggcttgatcctgggctgctggtgctacctgcggctgcagcgcatcagccagtcagaggatgaggagagcatcgtgggtgatggcgagacaaaggagcccttttactggtgcagtactctgctaa

SEQ ID NO: 62 - DNA, 399 bp, Mouse
aagggtcctgaagtcagttgttgcatcaaatacttcatttttggcttcaatgtcatattttggtttttgggaataacgtttcttggaatcggactgtgggcgtggaatgaaaaaggtgtcctctccaacatctcgtccatcaccgacctcggtggctttgacccagtgtggcttttcctctgagtggccagcccgagcctgagctctgtcaatgacatccaaggagaaaatgaggttaatgagagacattaattaaacactccctcaccccaccgcaccaaaccagttgggttcttctgatattctggaatactctgggctatgttttatgtttatttcttttttaatcggttgtattttggtctttttttttcttcttctttttcttttgctcccaaa

SEQ ID NO: 63 - DNA, 399 bp, Mouse
caaagcccactgtaggctccgctgaggtagcgattgctgtatttctggtcatctgcatcatagtggtcttaaccatcctgggctactgtttcttcaagaaccaaagaaaggaattccacagtcccctgcaccacccacctcccacaccagccagctccactgtttccaccacagaggacacagagcacctggtctataatcacacaacccagcctctctgagcctgggactcttgccagtcttaccaggtcctgcttgccaagacagaagctagaacctggaaaaacttggggaccagactcttcctacctctttcctgggcatacttacgctgtctcagaagacagatctctgggcctctcgcaggagtctcagctgcactcaggccagttcctgggg

SEQ ID NO: 64 - DNA, 2481 bp, Rat
gaactgtatctggatgggaaccagtttacactggtcccgaaggaactctccaactacaaacatttaacacttatagacttaagtaacaacagaataagcaccctttccaaccaaagcttcagcaacatgacccaacttctcaccttaattctcagttacaaccgtctgagatgtatccctccacggacctttgatggattgaaatctcttcgtttactgtctctacatggaaatgacatttctgtcgtgcctgaaggtgcctttggtgacctttcagccttgtcacacttagcaattggagccaaccctctttactgtgattgtaacatgcagtggttatccgactgggtgaagtcggaatataaggaacctggaattgcccgctgtgccggtcccggagaaatggcagataaattgttactcacaactccctccaaaaattttacatgtcaaggtcctgtggatgttactattcaagccaagtgtaacccctgcttgtcaaatccatgtaaaaatgatggcacctgtaacaatgacccggtggatttttatcgatgcacctgcccatatggtttcaagggccaggactgtgatgtccccattcatgcctgtacaagtaatccatgtaaacatggaggaacttgccatttaaaaccaaggagagaaacatggatttggtgtacttgtgctgatgggtttgaaggagaaagctgtgacatcaatattgatgattgcgaagataatgattgtgaaaataattctacatgcgttgatggaattaacaactacacgtgtctttgcccaccggaatacacaggcgaactgtgtgaggaaaaactggacttctgtgcacaagacctgaatccctgccagcatgactccaagtgcatcctgacgccaaagggattcaagtgtgactgcactccgggatacattggtgagcactgtgacatcgactttgatgactgccaagataacaagtgcaaaaacggtgctcattgcacagatgcagtgaacggatacacatgtgtctgtcctgaaggctacagtggcttgttctgtgagttttctccacccatggtcttccttcgcaccagcccctgtgataattttgattgtcagaatggagcccagtgtatcatcagggtgaatgaaccaatatgccagtgtttgcctggctacttgggagagaagtgtgagaaattggtcagtgtgtcaattttggtaaacaaagagtcctatcttcagattccttcagccaaggttcgacctcagacaaacatcacacttcagattgccacagatgaagacagcggcatcctcttgtacaagggtgacaaggaccacattgctgtggaatctatcgagggcattcgagccagctatgacaccggctctcacccggcttctgccatttacagtgtggagacaatcaatgatggaaacttccacattgtagagctactgaccctggattcgagtctttccctctctgtggatggaggaagccctaaaatcatcaccaatttgtcaaaacaatctactctgaatttcgactctccactttacgtaggaggtatgcctgggaaaaataacgtggcttcgctgcgccaggcccctgggcagaacggcaccagcttccatggctgtatccggaacctttacattaacagtgaactgcaggacttccggaaagtgcctatgcaaaccggaattctgcctggctgtgaaccatgccacaagaaagtgtgtgcccatggcacatgccagcccagcagccaatcaggcttcacctgtgaatgtgaggaagggtggatggggcccctctgtgaccagagaaccaatgatccctgtctcggaaacaaatgtgtacatgggacctgcttgcccatcaacgccttctcctacagctgcaagtgcctggagggccacggcggggtcctctgtgatgaagaagaagatctgtttaaccccctgccaggtgatcaagtgcaagcacgggaagtgcaggctctctgggctcgggcagccctattgtggatgcagcagtggattcaccggggacagctgacacagagaatttcttgtcgaggggaacggataagggattattaccaaagcagcagggtacgctgcctgtcaaacgactagaagtatctcgcttggagtgcagaggcgggtgtgctggggggcagtgctgtggacctctgagaagcaagaggcggaaatactctttcgaatgcacagatggatcttcatttgtggacgaggtcgagaaggtggtgaagtgcggctgcacgagatgtgcctcctaagtgcagctcgagaagcttctgtctttggcgaaggttgtacacttcttgaccatgttggactaattcatgcttcataatggaaatatttgaaatatattgtaaaatacagaacagacttatttttattatgataataaagaattgtctgcatttggaaaaaaaaaaa

SEQ ID NO: 65 - DNA, 3008 bp, Mouse
tagacgggagcctgtggctacaagccactcagcctgatgacgccggccactatacctgtgttcccagcaatggctttctgcatccaccgtcagcttctgcctatctcactgtgctctacccagcccaggtgacagtcatgcctcccgagacacccctgcccactggcatgcgtggggtgatccggtgtccggttcgtgctaatcccccactactgtttgtcacctggaccaaagacggacaggccttgcagctggacaagttccctggctggtccctgggcccagaaggttccctcatcattgcccttgggaatgaggatgccttgggagaatactcctgcaccccctacaacagtcttggtactgctggaccctcccctgtgacccgggtgctgctcaaggctcccccggcttttatagaccagcccaaggaagaatatttccaagaagtagggcgggagctactcatcccgtgctccgcccggggagaccctcctcctattgtctcttgggccaaggtgggccgggggctgcagggccaggcccaggtggacagcaacaacagcctcgtccttcgacccctgaccaaggaggcccagggacgatgggaatgcagtgccagcaatgctgtagcccgtgtgaccacttccaccaatgtatatgtgctaggcaccagcccccatgtcgtcaccaatgtgtctgtggtacctttacccaagggtgccaatgtctcttgggagcctggctttgatggtggctatctgcagagattcagtgtctggtataccccactagccaagcgtcctgaccgagcccaccatgactgggtatctctggctgtgcctatcggggctacacacctcctagtgccagggctgcaggctcacgcgcagtatcagttcagtgtccttgctcagaataagctgggcagtgggcccttcagtgagattgtcctgtctataccagaagggcttcctaccacaccggctgcccctgggctgcctgcaaccaggagcagagtgtgagcctgacttcccacgtggagagaagatcagaggcggatcctggcgcagacgttttcggtggcgtcgggcagccctgcgccgattcatcaggcaggcagctaggatgctcacaaggaccgccacgcccaagaagcagactccacccacaacaccagccaatacaggctggggcaggagacctggtagctgtgtgcgggaggggtacacctccaggccggaagtggagatgttggctacgttgctggggtcactgacgtagctatcagcgaaggccacgaggcgaaactcatagagaacgtccttgatgaggccaggcaccagcagctggatttctgtgcccgccacaccttggtccaggatctcccagccttgggagccttgccgtccctccaggatgtagccatccagcctcccagggatgagttctgggggatccctctgatcttctctccacgtgggaagtcaggctcacactctgctcctggttcaggcagccctgacagcgtgaccaagttcaagctccaaggctccccagttcccatcctacgccagagtctgctctggggggagcctgctcgaccgcctagccctcacccggattctccacttggccggggacccttaccattagagcccatttgcaggggcccagatgggcgctttgtgatgggacccactgtggccccctcacaagaaaagttatgtctggagcgcccagaacctcggacctcagctaaacgcttggcccagtcctttgactgtagcagtagcagccccagtggggtcccacaacccctctgcattacagacatcagccccgtggggcagcctcttgcagccgtgcctagccccctaccaggtccaggacccctgctccagtatctgagcctacccttcttccgagagatgaatgtggacggggactggccacctcttgaggagcccacgcctgcttcggcttcaaaattcatggatagtcaagccctgccccacctatctttccttccaccaccagactcacctcctgcaaatctcagggcaagtgcttcctgggacactgatgggggtcggggtctcctcagagcccccttacacagctttggctgattggactctgagggagcgggtcttgccgggccttctttctgctgcccctcgtggtagcctcaccagccagagcatgggaggggcaagcgcctccttcctgcgccctccctcacagccccctccgcaggggaagctacctcagtccactccaggagacacaaagcagctggggccagtggcccccgaaaggtggccccgcaagggaacatgtggtgacagtcacaaaaaggaggaaccacctctgtggatgagaactatgaatgggattcggaattcccaggggacatggagctgctagagacctggcacccaggcttggccagttctcggacccatcctgaacttgagccagagttaggtgtcaagactccagaggagagctgtctcctgaacccaacccacgctgccggccccgaggcccgctgtgctgcccttcgggaggaattcctagctttccgcagacgcagggatgctaccagggcccggctaccagcctatcagcagtccatctcttaccctgaacaggctactctgctatgagcccgcttagtgtgaaactaagaaaggcttatatggatttgcaaaggagtccaagactttggctccaagctggggtactgcccctacctctctgtgtctcggtggcctggtggtaggcttgagtgagcttggtatagagttggatgtactgactctttaattgagtttgggagctgaacaggaatgtgtgtgtgtgtgtgtgtgtgtgtgtgtgtgtgtgtgtgcgcgcgcaagcgcaagcgcgagttcgaaagtggtgtttatggtgtgggtgcaggttttttttttttaaaaaacaggtggataataaatgtttggaaccgttaaaaaaaaaaa

SEQ ID NO: 66 - DNA, 1888 bp, Mouse
  misc_feature (1)...(1888): n = A,T,C or G
aaagtggagggcgagggccggggccggtgggctctggggctgctgcgcaccttcgacgccggcgaattcgcaggctgggagaaggtgggctcgggcggcttcgggcaggtgtacaaggtgcgccatgtgcactggaagacgtggctcgcgatcaagtgctcgcccagtctgcacgtcgacgacagggaacgaatggagctcctggaggaagctaagaagatggagatggccaagttccgatacattctacctgtgtacggcatatgccaggaacctgtcggcttggtcatggagtacatggagacaggctccctggagaagctgctggcctcagagccattgccttgggacctgcgctttcgcatcgtgcacgagacagccgtgggcatgaacttcctgcattgcatgtctccgccactgctgcacctagacctgaagccagcgaacatcttgctggatgcccactaccaaatgtcaagatttcttgactttgggctggccaagtgcaatggcatgtcccactctcatgacctcagcatggatggcctgtttggtacaatcggctacctccctccagagcgaattcgtgagaagagccgcttgtttgacaccaaacatgatgtatacagcttcgccattgtgatctggggtgtgcttacacagaataatccatttgcagatgaaaagaacatcctacacatcatgatgaaagtggtaaagggccaccgcccagagctgccacccatctgcagaccccggccgcgtgcctgtgccagcctgatagggctcatgcaacggtgctggcatgcagacccacaggtgcggcccaccttccaagaaattacctctgaaacagaagacctttgtgagaagcctgatgaggaggtgaaagacctggctcatgagccaggcgagaaaagctctctagagtccaagagtgaggccaggcccgagtcctcacgcctcaagcgcgcctctgctccccccttcgataacgactgcagtctctccgagttgctgtcacagttggactctgggatcttcccaagactcttgaaaggccccgaagagctcagccgaagttcctctgaatgcaagctcccatcgtccagcagtggcaagaggctctcgggggtgtcctcagtggactcagccttttcctccagaggatcgctgtcactgtcttttgagcgggaagcttcaacaggcgacctgggccccacagacatccagaagaagaagctagtggatgccatcatatcaggggacaccagcaggctgatgaagatcctacagccccaagatgtggacttggttctagacagcagtgccagcctgctgcacctggctgtggaggccggacaggaggagtgtgtcaagtggctgctgcttaacaatgccaaccccaacctgaccaacaggaagggctctacaccactgcatatggctgtggagcggaagggacgtggaattgtggagctactgctagcccggaagaccagtgtcaatgccaaggatgaagaccagtggactgccctgcactttgcagcccaaaatggggatgaaggccagcacaaggctgctgctagagaagaatgcttctgtcaatgaggtggactttgagggccgaacacccatgcatgtagcctgccagcatggacaggagaacattgtgcgcaccctgctccgncgtggtgtggatgtgggcctgcagggaaaggatgcctggttgcctctgcactatgctgcctgcanggccaccttcccattgttaagctgctagccaagcagcctggggtgagtgtgaatgcccagacactaacgggaggacaccctgacctgctgttcaaaggggcatttaccngtggctcgcattctcattgacctg

SEQ ID NO: 67 - DNA, 1260 bp, Rat
cccccagtcgctttgggtatcagatggatgaaggcaaccagtgtgtggatgtggacgagtgtgcgacagattcacaccagtgcaaccctacccagatctgtatcaacacggaaggagggtacacctgctcctgcactgatgggtactggcttctggaagggcagtgcctagatattgatgaatgtcgctatggttactgccagcagctctgtgcgaatgttcctggatcctattcctgtacgtgtaaccctggcttcaccctcaacgatgatggaaggtcttgccaagatgtgaacgagtgtgaaactgagaacccctgtgttcagacctgcgtcaacacctatggttctttcatctgccgctgtgacccakgatatgaactggaggaagatggcattcactgcartgatatggatgagtgcarcttctccgagttcctctgtcaacatgagtgtgtgaaccagccgggctcatacttctgctcatgccctccaggctwcktcttgttggaagataaccgaagctgccaggatatcaatgaatgtgagcmccggaaccacacatgcactcccctgcagacttgctacaatctgcaagggggcttcaaatgtatcgaccccatcgtctgcgaggagccttatctgctgattggggataaccgctgtatgtgccctgctgagaatactggctgcagggaccagccattcaccatcttgtttcgggacatggatgtggtatcaggacgctctgttcctgctgacatcttccagatgcaagcaacgacccgataccctggcgcctattacattttccagatcaaatctgggaacgagggtcgagagttctacatgcggcaaacagggcctatcagtgccaccctggtgatgacacgccccatcaaagggcctcgggacatccagctggacttggagatgatcaccgtcaacactgtcatcaacttcagaggcagctccgtgatccgactgcggatatacgtgtcccagtatccgttctgagcctcgggttaaggcctctgacactgccttttaccacgccgagggacaggaggagagaagaaccccaacgagggacaggaggagagaagaaaccagcaagaatgagagcgagacagacattgcacctttcctgctgaacatctccctggggcatcagcctagcatcctgacccctacctgtactatcgcaaactgtcactctgaaggacaccatgccccagttcctatgatgcagtagtatcca

SEQ ID NO: 68 - DNA, 1729 bp, Mouse
gaattcggcacgagcagaatatggctctgggggttctgatagcagtctgcctcttgttcaaagcaatgaaggcagcactgagcgaagaagcagaggtgatccctcctagcacagcacagcagagcaactggacatttaacaacaccgaagctgactacatagaagaacctgtagctctgaagttctctcatccttgtctggaagaccataatagttactgcattaatggagcatgtgcattccaccatgagctgaagcaagccatttgcagatgctttactggttatacgggacaacgatgtgagcatttgaccctaacttcgtatgctgtggattcttatgaaaaatacattgcgattgggattggcgtcggattgctaattagtgcttttcttgctgtcttctattgctacataagaaaaaggtgtataaatctgaaatcaccctacatcatctgctctggagggagcccattgtgagaccttataagacatagtcatcaagccatttgtcaaaagccacagggaatccaatggagatctttggatgatacaaaatgtgataagctaacttgaaaataatggtggtttgggtcacaatgcagtaactgaccattggttcttagctttggtcatcgttgggtgccatggaagctatgggaatgagctacagtaacagaagccaagttcactacccttctttgggtttgctgttgggtggttgttgtcactgcaggaagatttgttctatacttctgaccatctcagatgtgaattttcattttaattgttttctactacacatcaatcaagtccaagtaatgccatttccgggttcttcgggcactcaacattttgggccacccgcctcgatggacctaatagcaaagtatctgtccttatggaatttcagggaatttggtatcaatttttagatgaaaacagtgaatgtctcagctccttgagtgaaccaaagatgcattacacctaaaccactaaaagaaaatggaatatccaaggcagcataaatcctacccagctggtgacaacagtttgcaaacttcattcatgtagtttggaagaagcagataaattcctgaggactgaaagtcacctggacagcagatccagagcaggcaaaggtagctggttcctatatcgaccataaagcctgtgtgggctcatctgtcccctgatgtttttgcctatcatctcagccttacattggaagactcacacttggtatccatcgcttgaactgaagttcgacaattcacctaatgactaaaagcttacaattgttcccaaaatatataggaacaacagcatgtggaatgtaaccattttttgacgtgttgatagcatatttgcacatgggttaaaaaaagaaacagtcgtagaaatacttattagggaatcagtatccctccttggaattgcttctgctacatgattcaatcttgggcaagtctcttatattctttgtggtttggttccattctctacaagacccatgcagttccaaaattgaactctaatagaactaaaaaatacctcctataactgcatggcaggcaagattatcctcaatgcttccatcctcagccccgtttctaaccctcaaatacccacgaatattatccttactatatattgtcatgttcagtttgtaaaataataacttattttgaaaagaaataaaaaatgaaattacaaagcaaaaaaaaaaa

SEQ ID NO: 69 - DNA, 355 bp, Rat
ctcgtgccgcaattcggcacgaggattcgctatactgcatatgaccgagcctacaaccgggccagctgcaagttcattgtaaaagtacaagtgagacgctgtcctattctgaaaccaccacagcatggctacctcacctgcagctcagcgggggacaactatggtgcgatctgtgaataccactgcgatggtggttatgaacgccaagggaccccttcccgagtctgtcagtcaagtcgacagtggtctggatcaccacctgtctgtactcctatgaagattaatgtcaatgttaactcagctgctggcctcctggatcagttctatgagaaacagcgactcctcatagtctcag

SEQ ID NO: 70 - DNA, 1421 bp, Human
gattagcgtggtcgcggccgaggtgtctgttcccaggagtccttcggcggctgttgtgtcagtggcctgatcgcgatggggacaaaggcgcaagtcgagaggaaactgttgtgtctcttcatattggcgatcctgttgtgctccctggcattgggcagtgttacagtgcactcttctgaacctgaagtcagaattcctgagaataatcctgtgaagttgtcctgtgcctactcgggcttttcttctccccgtgtggagtggaagtttgaccaaggagacaccaccagactcgtttgctataataacaagatcacagcttcctatgaggaccgggtgaccttcttgccaactggtatcaccttcaagtccgtgacacgggaagacactgggacatacacttgtatggtctctgaggaaggcggcaacagctatggggaggtcaaggtcaagctcatcgtgcttgtgcctccatccaagcctacagttaacatcccctcctctgccaccattgggaaccgggcagtgctgacatgctcagaacaagatggttccccaccttctgaatacacctggttcaaagatgggatagtgatgcctacgaatcccaaaagcacccgtgccttcagcaactcttcctatgtcctgaatcccacaacaggagagctggtctttgatcccctgtcagcctctgatactggagaatacagctgtgaggcacggaatgggtatgggacacccatgacttcaaatgctgtgcgcatggaagctgtggagcggaatgtgggggtcatcgtggcagccgtccttgtaaccmtgattctcctgggaatcttggtttttggcatctggtttgcctatagccgaggccactttgacagaacaaagaaagggacttcgagtaagaaggtgatttacagccagcctagtgcccgaagtgaargagaattcaaacagacctcgtcattcctggtgtgagcctggtcggctcaccgcctatcatctgcatttgccttactcaggtgctaccggactctggcccctgatgtctgkagtttmacaggatgccttatttgtcttttacaccccacagggccccctacttcttcggatgtgtttttaataatgtcagctatgtgccccatcctccttcatgccctccctccctttcctaccactgmtgagtggcctggaacttgtttaaagtgtttattccccatttctttgagggatcaggaaggaatcctgggtatgccattgacttcccttctaagtagacagcaaaaatggcgggggtcgcaggaatmtacactcaactgcccacctggctggcagggatctttgaataggtatcttgagcttggttctgggctctttccttgtgtacctgcccgggcggccgctcgaaatcaagcttatcgata

SEQ ID NO: 71 - DNA, 378 bp, Human
tagcgtggtcgcggccgaggtacaaaaaaaccttacataaattaagaatgaatacatttacaggcgtaaatgcaaaccgcttccaactcaaagcaagtaacagcccacggtgttctggccaaagacatcagctaagaaaggaaactgggtcctacggcttggactttccaaccctgacagacccgcaagacaaaacaactggttcttgccagcctctagagaaatcccagaacactcagccctgacacgttaataccctgcacagatcagaggctgctggccacacagactcaccaagccacagacttgtcttccacaagcacgttcttaccttagccacgaagtgacccaagccacacgtacctgcccgggcggccg

SEQ ID NO: 72 - DNA, 267 bp, Mouse
ggggcatgggccatgctgtatggagtctcgatgctctgtgtgctggacctaggtcagccgagtgtagttgaggagcctggctgtggccctggcaaggttcagaacggaagtggcaacaacactcgctgctgcagcctgtatgctccaggcaaggaggactgtccaaaagaaaggtgcatatgtgtcacacctgagtaccactgtggagaccctcagtgcaagatctgcaagcactacccctgccaaccaggccaaagggtggaagtc

SEQ ID NO: 73 - DNA, 1633 bp, Mouse
  misc_feature (1)...(1633): n = A,T,C or G
ggcacgagcgggagcctgctactgccctgctgggttccttggggccgactgtagccttgcctgtccacagggtcgcttcggccccagctgtgcccacgtgtgtacatgcgggcaaggggcggcatgtgacccagtgtcggggacttgcatctgtcctcccgggaagacgggaggccattgtgagcgcggctgtccccaggaccggtttggcaagggctgtgaacacaagtgtgcctgcaggaatgggggcctgtgtcatgctaccaatggcagctgctcctgccccctgggctgnatggggccacactgtgagcacgcctgccctgctgggcgctatggtgctgcctgcctcctggagtgttcctgtcagaacaatggcagctgtgagcccacctccggcgcttgcctctgtggccctggcttctatggtcaagcttgtgaagacacctgccctgccggcttccatggatctggttgccagagagtttgcgagtgtcaacagggcgctccctgtgaccctgtcagtggccggtgcctctgccctgctggcttccgtggccagttctgcgagagggggtgcaagccaggcttttttggagatggctgcctgcagcagtgtaactgccccacgggtgtgccctgtgatcccatcagcggcctctgcctttgcccaccagggcgcgcaggaaccacatgtgacctagattgcagaagangccgctttgggccgggctgtgccctgcgctgtgattgtgggggtggggctgactgcgaccccatcagtgggcagtgccactgtgtggacagctacacgggacccacttgccgggaagtgcccacacagctgtcctctatcagaccagcaccccagcactccagcagcaaggccatgaagcactaactcagaggaacgcccacagaggcccactactgtgttccagcccaagggacccaggcctctgctggtgactaagatagaggtggcacttttggatccacacctcttctggaaagccatggattgctgtggacagctatggatagtcatatagccacacacccgggctccatggtcatggggaagaaggcctcctttggacacaaggaatccaggaagtcggctgggcttcgggccactgtttacatggggaccctgcaggctgtgctgtggaatcctggccctcttcagcgacctgggatgggaccaaggtgggaatagacaaggccccacctgcctgccaggtccttctggtgctaggccatggactgctgcagccagccaactgtttacctggaaatgtagtccagaccatatttatataaggtatttatgggcatctccacctgccgttatggtcctgggtcagatggaagctgcctgaccccagaacttaggcagtggcctgtggggtctccagcaagtgggatcaagggttttgtaaaacccagtgagttaaaggcacagtggngccccanngaactnngtttcngtgcantatgtagnctccngnntcntnccnagannaggtnctttagggtccnnnantgnnnacctncngtacncctctgtaatgacatgcatgtaatgtaatgcttcagtcaccttanggttcttcctgacttccagctctag

SEQ ID NO: 74 - DNA, 1252 bp, Mouse
ggaagagccgtgcaataatgggtctgaaatccttgcttataacatcgatctgggagacagctgcattactgtgggcaacactaccacacacgtgatgaagaacctccttccagaaacgacataccggatcagaattcaggctatcaatgaaattggagttggaccatttagtcagttcattaaagcaaaaactcggccattaccgccttcgcctcctaggcttgagtgtgctgcgtctggtcctcagagcctgaagctcaagtggggagacagtaactccaagacacatgctgctggtgacatggtgtacacactacagctggaagacaggaacaagaggtttatctcaatctaccgaggacccagccacacctacaaggtccagagactgacagagtttacctgctactccttcaggatccaggcaatgagcgaggcaggggaggggccttactcagaaacctacaccttcagcacaaccaaaagcgtgcctcccaccctcaaagcacctcgagtgacgcagttagaagggaattcctgtgaaatcttctgggagacggtaccaccgatgagaggcgaccctgtgagctacgttctacaggtgctggttggaagagactctgagtacaagcaggtgtacaagggagaagaagccacattccaaatctcaggcctccagagcaacacagattacaggttccgcgtgtgtgcctgccgccgctgtgtggacacgtctcaggagctcagtggcgcgttcagcccctctgcggctttcatgttacaacagcgtgaggttatgcttacaggggacctgggaggcatggaagaagccaagatgaagggcatgatgcccaccgacgaacagtttgctgcactcatcgtgcttggcttcgcgaccctgtccattttgtttgcctttatattacagtacttcttaatgaagtaaatccagcaggccagtggtatgctcggaacgccacacgttttaatacacatttactcagagcctcccctttttacgctgtttcgttctttgatttatacgcttctcttgttttacacatttagctaggggaaagagtttggctgcacctatttgagatgcaaaactaggaagaggttaaactggatttttttttaaacaataataaataaaggaataaagaagagaaggaagcggcgggcaagctccagacaccgagagccagtgtgcccaacgagcttgccttgtcgggcttcccgtgtgcttctg

SEQ ID NO: 75 - DNA, 2411 bp, Mouse
tcggcacgagagtgggtacaccttactacatgtctccagagagaatacatgaaaatggatacaacttcaagtctgacatctggtctcttggctgtctgctatatgagatggctgcactgcagagtcctttctacggcgacaagatgaacttgtattctctgtgtaagaagatagagcagtgtgactacccgcctctcccgtcagatcactattcggaggagctacgacagctagttaatatatgcatcaacccagatccagagaagcgacccgacatcgcctatgtttatgatgtggcaaagaggatgcatgcatgtaccgcaagcacctaaactgtacaagatcctgaagacggcaaccaagataacttaaaagtgtttttgtgcagatcatacctccccgcttatgtctgggtgttaagattactgtctcagagctaatgcgctttgaatccttaaccagttttcatatgagcttcatttttctaccaggctcaatcaccttcccaatccacaactttgggatgctcagatggcaccaagaatgcaagcccaacaagagtttttcgtttgagaattgtttcgagtttctgctgatagactgtgtttatagatagtcagtgcccgatggtgaagcacacacacataggcacatgtccagagcgatgcagaacctgaggaaggacctgggcatttgacttgtttgcttttaagtcacttaatggacgttgtagtggacatgattgtgaacttctgatttttttcttttaagtttcaagtacatgttttagttcttagcattagagatctcaaatataattcttataagacatgcagacataaactttttgagaaagatttaaaatttttagtttatacattcaaaatgcaactattaaatgtgaaagcatagaggtcaaaatgtgagttggacactgaagtctatgttttaatgcctttgaaagcctttttttgtgtgtgtttaaatggtataaatgaacccattttaaaacgtggttaaggacttgtttgcctggcgtgatagtcatgtttaacatgcacaaggctttgtgtttttattgtacatttgaagaatattcttggaataatcttgcagtagttatagttcaatttctttacaaatctaaatacacttaactcataactatacactgtaatgcaagcatatattgttattcatatattgaagttttgatcagttcctcttcagaatcttttttatccaagttactttcttatttatattgtgtgtgcatttcatccattaaatgtttcagattttctgagaatgagttccctttttaaaatatatttggtatgccaacacttttttaggattgaaaaaaaatttttttaaatgtttgggtcattctaggtgcatctgttttctcttgttagaaagaaaaggtgtgtgttaaaatgtgcctgtgaatgtcgatattgtttggcagggttataattttagagtatgctctagagtatgttgaacagcgtgaagactggcccttactgaagacagaactgttccaagagcagcattcccgttgagatgctttggagtaaagtactgtgtatgacgatgacagacattttagttaagggggtgaaaaaaaaaggaggggtatttaggaaaccctgaggtggaattttggtgaatgtcttcatcttaataccagccaattccttcagagaattgtggagccaaagaacagagtaatcgtggctgttgcagaacacggtgtgccatggtagagcattgggaaggctcatcctgccggtgggtcggtcagacagccctgtgttggggagcttgtactctggcccacagagctcggttgattttcttacagagtattctttctacagttattttcaagtaattgtaaattttcaaagtaatatctcatcttttaattcactatgtatgctgtcgtagacaaaggaaatctgggtttttttttgtttttgtttttgtttttttttgtcttgaaggctgaactgggtacatcccagatcttagtggctcataggatatacccagaggcatgaagaaatggcttccggtgaccatttgtgttgkgktatatcccattgtaatgtcacaggactgattgagatgaaacatccccttcctacaagagttgttttctttccatatttaaaaacatgaggttctgcctggcagtgatggtacacacctttaatcccagcacccgggaggcagaggcaggaggatttctgagttcgaggccagcctggtctacaaagtgagttccaggacagccaggactacacagagaaatcctgtctcaaaaaaccaaaactaaatgaaaatacaaggcttctccccttgtagtgactttgctttatgaatttgtctcaaaaaaaaaa

SEQ ID NO: 76 - DNA, 1335 bp, Mouse
acccaaacagcccgggaccatgctgtcgctccgctccttgcttccacacctgggactgttcctgtgcctggctctgcacttatccccctccctctctgccagtgataatgggtcctgcgtggtccttgataacatctacacctccgacatcttggaaatcagcactatggctaacgtctctggtggggatgtaacctatacagtgacggtccccgtgaacgattcagtcagtgccgtgatcctgaaagcagtgaaggaggacgacagcccagtgggcacctggagtggaacatatgagaagtgcaacgacagcagtgtctactataacttgacatcccaaagccagtcggtcttccagacaaactggacagttcctacttccgaggatgtgactaaagtcaacctgcaggtcctcatcgtcgtcaatcgcacagcctcaaagtcatccgtgaaaatggaacaagtacaaccctcagcctcaacccctattcctgagagttctgagaccagccagaccataaacacgactccaactgtgaacacagccaagactacagccaaggacacagccaacaccacagccgtgaccacagccaataccacagccaataccacagccgtgaccacagccaagaccacagccaaaagcctggccatccgcactctcggcagccccctggcaggtgccctccatatcctgcttgtttttctcattagtaaactcctcttytaaagaaaactggggaagcagatctccaacctccaggtcatcctcccgagctcatttcaggccagtgcttaaacatacccgaatgaaggttttatgtcctcagtccgcagctccaccaccttggaccacagacctgcaacactagtgcacttgagggatacaaatgcttgcctggatctttcagggcacaaattccgcttcttgtaaatacttagtccatccatcctgcgtgtaacctgaagttctgactctcagtttaacctgttgacagccaatctgaacttgtgtttcttgccaaaggtattcccatgagcctcctgggtgtgggggtggggagggaatgatccttctttactttcaaactgatttcagatttctggccaaacctactcaggttgcaaaggacttatgtgacttatgtgactgtaggaaaaagagaaatgagtgatcatcctgtggctactagcagatttccactgtgcccagaccagtcggtaggttttgaaggaagtatatgaaaactgtgcctcagaagccaatgacaggacacatgactttttttttctaagtcaaataaacaatatattgaacaaggaaaaaaaaaa

SEQ ID NO: 77 - DNA, 440 bp, Mouse
  misc_feature (1)...(440): n = A,T,C or G
cactagggnctccaaagaattcagcacgaggagaagccttgcccactcaaatacctgggccatcagctgcaccggctccactcccatctgctccaggccctgaagagaagccaacacttttcaggcccctcaacctccacatcagaacaggcagagcctgtggtgtcagctgttgatccaaaggcaacccttggtggggttggggttgtaaagtagtgatgctaatttctaagcaacaagctctgagctgcagcccccaggccctccagggcagtccagggcagtgccagggttcagggtagttctaggggtctagtatctggatcaacaagtcccagagttgggcccagtggctgctgacttgttcaatgaccaagaatatacgacctaaccttttttatttggttgggcaaccacagctccgagtaagtcatcaaggc

SEQ ID NO: 78 - DNA, 204 bp, Mouse
ctccataaaattcctcaaaatctgttcccccagcagatttcctgtgccatcttgggctcccttcctattctttcccgtctttagggcctcctcacagtgttgttttctaacaacgcaggcatgagaaggcactcactgtgtgctccctcaggcctggcctctcctggtgattgtcttcttcctctgtgtcctcttcatcccaat

SEQ ID NO: 79 - DNA, 300 bp, Mouse
  misc_feature (1)...(300): n = A,T,C or G
tatttatgacttgggttaagggagtttgctgtgcaatcatgaagaccagagttcagatcccagcacccatatagcaagagagcatacaagaagcacctgtgactgcactctgaagaatccaacaccttcttctggcctccatggcacacagaaccccccaacacatgctcatccactctcaaagagacatacataaaaataaatatttaggtcctgggtccctcagagactagtcttcacaggtcctaaatacaaacgnagcggaccgcaaagggtgagggagtggncctgaagaagcta

SEQ ID NO: 80 - DNA, 214 bp, Mouse
cccagaccctgtgtcagctatcccagcagaaaaagaagatgcggaccctctcagcaagtcaggtgaggaaacccaggaagcagggtcatgaccccgcagaggtcggggctcctggtgcagaggatcagatcttgtgtgacttctgtcttggggccagcagagtaagggcagtgaaatcctgtctgacctgcatggtgaaatactgtaaggagca

SEQ ID NO: 81 - DNA, 152 bp, Mouse
ccccttaactaacccaggaccttccactaagtggaaggctccaccatccacagagggggccagtcatttttaagcacacggaccttttgtgagacagtcgtgatcttaactgtggtgtcactgatggagctgaacggtatcccctaaaagta

SEQ ID NO: 82 - DNA, 181 bp, Mouse
tctcagtgatgatgagaagctccggaggaggcaggagaaagcagggccccgcccctccctgggtctccacccacccacgcccgctaaggtcacctgttctcccatggagatgatgaagaagctcatagctggacaaggcccggaacctcagcccagtaaccgacctacttcccgcctggga

SEQ ID NO: 83 - DNA, 332 bp, Mouse
tatagagatggtgatgtaatgggccagggtgtaagcttcaacctgggggattttgctggttttgttgtttccctgtgtagccctaacaagcctgtgtagaccaggctggctttaactttgcagatgacattcacgtctacttctctctgtgttggggttatgggtctgcacacctgcccaggcctaggctgggggattttgaagtatcttagattatggagtagacccagagtttgcaagtatctgctttaaagtgacacataaacatagcctcctgaccatcttccacagtgggaccctgatctggcctctccctggaagaagagagaaag

SEQ ID NO: 84 - DNA, 213 bp, Mouse
gcaggcagataacaatgattactggacagagtgcttcaacgcattggaacaggggaggcaatatgtggataatcccacaggcgggaaagtggacgaggctctggtgagaagtgccaccgtacattgttggccgcacagcaacgtgctggacacaagcatgctctcatccccagatgtggtgcgcatgctgctgtccctgcagcccttcctgca

SEQ ID NO: 85 - DNA, 273 bp, Mouse
  misc_feature (1)...(273): n = A,T,C or G
ccggctctctctctcctccttccccgcctcttctgcctcccctgcctggaactctgatgaggagggaccaggtggtcaggcaccccagtctgatcaggactcctgtggcctccagagtttcantcccccgtccatcctgaagcgggctcctcgggagcgtccaggtcangtggcctttaacggcatcancgtctactatttcccacggtgccaaggattcaccagtgtgcccaagccgtggtggctgtaccctgggnatggcttctcggcaca

SEQ ID NO: 86 - DNA, 218 bp, Mouse
ctcagccgcctgctctgggggctggagggtctcccacttaactgtgtctgccgttcagggggctcacccagtgctgcgctacacagaggttttccctccagctccagtccgtcctgcctactccttctataaccgcctccaagagctggcctcactgttgccccggccggataagccctgcccagcctatgtggagcctatgactgtggtttgtcacc

SEQ ID NO: 87 - DNA, 335 bp, Mouse
gaggtggggtgggtgcatagcctgcctgcaattgctgccgctgggcttaacgtgttgtgagctggccggtttcctacacagcagcacctgccatggagcctggccacaaggccactcagagctgggtggacagagtgtgaccagaaactccctgtgggttctgataaaggattctcccataggcaaggttcagagaacctgggcctcctgttctcagggaggcctgtctatccccagcctctgagctgtttcgtcctagttggtgagttaagtggcatagccctcttgaggcctctgatgtggaaggggcacagaattgcaattattcttgcatg

SEQ ID NO: 88 - DNA, 410 bp, Mouse
aaaccccgccaggaaacaaataccggtgtatcggctttactgaatgcatttattcccaaagggaaactgaaaagcaacctagggacactgtaagcagaaagctgaggcttttaaaaacccaccttggcaatgtaacttgggaggttcccacacacccagggctgtgcatcgtgaaattctgtctcctgagacgctgagaaacccttccttgcagctataatgggcctggccgcccagtgtggagctgtagcttcccacgacgtagccctcaggaacttcaggagggatgccacagtctatttctgaaaacaaaaccgtgtcaacttctttactttacaaatgcaagttttcagaatccaccatctctctgcacccataccccatgcctcacaccccagaccctgtgttag

SEQ ID NO: 89 - DNA, 279 bp, Mouse
gtgcagagagtggattgtcagtggactgctcagttacaaatgggacatctaacacacacacacacacacacacacacacacacacacacacaccccaaggcttagagaccattgcagaagagaagagtttatgggaaatcttggagaaaacattggatggtttgagagaatggttaggagatcagactagctagtccaggaagcagtgaaggggggcggggttagaagatgaggtcagaagacagggtggagggcattgtccgacagaaccattgctgt

SEQ ID NO: 90 - DNA, 398 bp, Mouse
ccaccaacccagaaatttgacaaaggggttgaatgttggactttgcgtccttccccggcagtggatgtactgttttgagccctgtgtggaacttctgaacttcgtgctgtaactttcagaactcttagacatgggtgtgctcactgaactctagggtctgtgtgctagatgctgccaacgctgtattcaggacctgaagtgagtacccgtgtggatccagaccaatccagtgtgagactactgaagaacatctgttgccagaacggccacaccaaacagatggagtgccccagcacttagcttcttaaataacatcggaaccattcagccagcgagtctgtgtttgctttttgttaaattgtccgccgaatctaaattcctccaaaaggcttgtgacc

SEQ ID NO: 91 - DNA, 279 bp, Mouse
gttgttacttcagttgctctcggcgggaattcttaaactgcatcctgagtgagggagctttggcgagaaagcaagacccagtggtagacagattagcattactgtacagcttctttgggtgttcgaggaagcccggctggaccatagtggccacggcggtgaggtaggcgtggacagggctgaccagtccaagttaaggacgttcgggtccatgttaaccctgccttgtacgtccagcatcgtaagaaaaaacacttgagaacccgaagaggagatgga

SEQ ID NO: 92 - DNA, 401 bp, Mouse
aaaaagttttaccaaaaccttttattgacttttataaattagatagtatttcaaagtttatgtagaatcgtattctttgaaactgtacttagcagagcagaagaggcctgctgacgctagcacgctctgcaatgaatcatgtggcaccgagtctacgccaaggcccccgagaaactttattccatagatgggcagatggttcccaaagttacactacagaactacaaatcgactcttaaaattaaaacgggactttacaagcattctagaagactcaaacttgaagcaatttttggaaaataaatgtacagagaaaagatcttgaagctactgaacagagaaccctcattaaccgagcaaatacatcctatggagcttccgaggagtacacagacagaccg

SEQ ID NO: 93 - DNA, 339 bp, Mouse
ccactgaccttcccagaaggtgacagccggcggcggatgttgtcaaggagccgagatagtccagcagtgcctcggtacccagaagacgggctgtctccccccaaaagacggcgacattcgatgagaagtcaccacagtgatctcacattttgcgagattatcctgatggagatggagtcccatgatgcagcctggcctttcctagagcctgtgaaccctcgcttggtgagtggataccgacgtgtcatcaagaaccctatggatttttccaccatgcgagaacgcctgctccgtggagggtacactagctcagaagagtttgcagctgatgctctgctg

SEQ ID NO: 94 - DNA, 55 bp, Mouse
ggggtgtgggcaacttggataacctcagctgcttccatctggctgacatctttgg

SEQ ID NO: 95 - DNA, 186 bp, Mouse
ggactctggcttcctggggctgcggccgacctcggtggatcccgctctgaggcggcggcggcggggccccagaaacaagaagcgcggctggaggaggctcgccgaggagccgctggggttagaggtcgaccagttcctggaagacgtccggctacaggagcgcacgaccggtggcttgttggcaga

SEQ ID NO: 96 - DNA, 244 bp, Mouse
ggtgaccaaaaccccttctgcccccttcccagagactctgacttgaccctctttccaattccctctccccaaggccatggattatgaagcccctctgtaagatggtgagccaggggccctaagagggcatgaggcacaccctgatcactgtctcaggcctttgtgggcactgactcgaccctggcccacctcacgcccccaggccagttggcaactggtggctcttgagggctcttacgccctt

SEQ ID NO: 97 - DNA, 116 bp, Mouse
  misc_feature (1)...(116): n = A,T,C or G
acccggtctgngnactgcccgccttctggggcttcctttanaggatacagtcttttacccatctaggactcctgccaccctgactgctgacttacagctatgaggtcccggcttct

SEQ ID NO: 98 - DNA, 307 bp, Mouse
ccccgggccatctgtcgccataccgggcccgtgcaagcttttgcaggttttagaagatggcgaattcatgacacctgtgatccaggacaacccctcaggctggggtccctgtgccgttcctgagcaatttcgggatatgccctaccagccattcagcaaaggagatcggctgggaaaggttgcagactggacaggggccacataccaggacaagaggtacacaaacaagtattcctctcagttcggtggggggagtcagtatgcatatttccatgaggaggatgagacaagctttccagctgggtgg

SEQ ID NO: 99 - DNA, 360 bp, Mouse
  misc_feature (1)...(360): n = A,T,C or G
ccttggtgcaccagctccagcctcaggacttcctcctcctggccctgacagcccagctcttgtcccagcagaatccagtgacaggaaggagtttctgaggcaggggaggaggcttctccatgggaaccagacagccttgcttcactgtataagtgccctgatcacacgcagaatgaagtgccaggttgctcagaagcacaaagggtgtggctactggccctaaccatggactacgtggttctaaccaaagactctagaactctggggtgggggagaaacaatgtgttctgtgctccagaaccttnggcttcctggcccatatggatgggcttggcaaggaacctacctcttctctaaggt

SEQ ID NO: 100 - DNA, 257 bp, Mouse
tgccgcgctgagagggggggccgcaccaccagcgccaccaccaccaccgccgccgccgccgggtggggtgggaggggcgggagccaccgctaccgccgccgcctcccgggtgggcgcccttctccttagacgccggcgacccaggacgagggcttcatcactgtaaatggttgcaagccgacaaagctgcacctcctgaaaaagacggacagcccatcgcgtgagctgtagaaatttgtggacgcatttctatcggt

SEQ ID NO: 101 - DNA, 203 bp, Mouse
ccaaagtgcccattgtgattcaagacgatagccttcccacggggccccctccacagatccgcatcctcaagaggcccaccagcaacggtgtggtcagcagccccaactccaccagcaggccagcccttcctgtcaagtccctagcacagcgggaggcagagtatgcagaggctcggagacggatcctaggcagtgccagccct

SEQ ID NO: 102 - DNA, 300 bp, Mouse
agtacagagacctcggctgcagcttaaacctcggacagtggcaacgcccctcaatcaagtagccaaccccaactcagccatctttgggggagccaggcccagagaggaagtggttcagaaggagcaagaatgagcttaggttgggagggaatggggcgtgggggagctggagcaagaccacggcctggtggcagccggtcgccctacaggccccattcccgcctggcactgtcctccttacagcggaaacacagagcttgtgagtgcatgtcagctgttaacaagtggtttctagtacat

SEQ ID NO: 103 - DNA, 370 bp, Mouse
cagcaactgtttcaggagctgcacggtgtacgcctgctgactgatgcgctggaactaacactgggcgtggcccccaaagaaaaccctccggtgatgcttccagcccaagagacggagagggccatggagatcctcaaagtgctctttaatatcacctttgactctgtcaagagggaagttgatgaggaagatgctgccctttaccggtacctggggactcttctgcggcactgcgtgatggttgaagctgctggggaccgcacagaggagttccacggccacacggtgaatctcctggggaacttgcccctcaagtgtttggatgtgcttctggccctggagctccacgaaggatccttagagtcaatgg

SEQ ID NO: 104 - DNA, 423 bp, Mouse
tttcccagcctggtggagcagccgactggcgagtgtgccaactgtcccgtgcttcccagctcctaccttgcctgtcttctctctcctgggaagatgttcctggtggggctgacgggaggcatcgcctcaggcaagagctccgtcatccaggtattccaacagctgggctgtgctgtaatcgacgtggacgtcattgcgcggcacgttgtccagccagggtatcctgcccaccggcgtatagtagaggcctttggcactgaagtcttgctggagaatggcgacatcgaccgcaaggtcctcggagacctgatcttcaaccagcctgaccgtcggcagctgctcaactccattacccaccctgagatccgcaaggaaatgatgaaggagaccttcaagtacttctccgaggtaccgatacgtgat

SEQ ID NO: 105 - DNA, 117 bp, Mouse
agcttggtgctgttcatatttaaactgataaagactcttcataggagctgagggtagcaagcccgcgtcggtgactggggtctcacacaggttcagcacttggagcatagtgaggtg

SEQ ID NO: 106 - DNA, 133 bp, Mouse
ttttttttttaaaataccaccatttccaatcccaaaagaacatggcacttgtttgtttcttccccttctcattcattccagactttcaagtgttttcttcaatactgaggctttctcctgcagctctggtctg

SEQ ID NO: 107 - DNA, 217 bp, Mouse
  misc_feature (1)...(217): n = A,T,C or G
nttttttttgngcgcacnnnnnngnnnncgcccnggnngnnnagcctacnnncannnngttttcttctccaggctgaagacctgaacgtcaagttggaaggggagccttccatgcggaaaccaaagcagcggccgcggccggagcccctcancanccccaccaangcgggcactttcatcgcccctcctgtctactccaacatcaccccttaccaga

SEQ ID NO: 108 - DNA, 346 bp, Mouse
gggcatagaaggcatctcgaaaagaatacttatttgaattgaaggaagatgaagaggcctgcaggaaggctcagaagacaggagtgttttacctctttcatgacctggatcctttgctccaggcgtcaggacatcgatacctggtgccccggcttagccgagcagagttggaagggctgctgggtaagttcggacaggattcgcaaagaattgaagattcggtgctggttgggtgctccgagcagcaggaagcatggtttgctttggatctaggtctgaagagtgcctcctccagccgtggacaagtatcgctgctccagcagcttgactgctgtaaagaggatct

SEQ ID NO: 109 - DNA, 242 bp, Mouse
ccacattgtccacaactggaaggcacgatggttcatccttcggcagaacacgctcctgtattacaagctagagggtggccggcgagtaaccccgcccaaggggaggattgtccttgatggctgcaccatcacctgcccctgcctggagtatgaaaaccggccgctcctcattaaactgaagacccgaacttccactgagtacttcctggaagcctgttctcgagaggagagagactcctggg

SEQ ID NO: 110 - DNA, 310 bp, Mouse
  misc_feature (1)...(310): n = A,T,C or G
cccggccgggaatccaggtggtagctggtggagtcgcctccggagagtgacgcgcagactcggctcccccgcggcccgccctcctgccggcctcgccgcggtctcccttgctccctgagatcgctgagcgctgagcagcggcccgggagaggaggccttgggcgacggggcgcggagagggagggcgggcgggcantgggggcgccgcggatctctatatggcgacgggtctgtcgggtctggctgtccggctgtcgcgctcggccggncggccggttcctatggggtcttctgcaaaggggttgacccg

SEQ ID NO: 111 - DNA, 228 bp, Mouse
ttcttttttaacatttggtggtttttttctttactctttttttcttttccttctttttctgccctcaaccccccaactcctttggtatgaagtacttttaacatttatatttcattgttacactttaaattttgtaaggaaaactctgatatttcattcctcctgaaccactaatgttagaatttatttctaagaatcagtcaacatgtatactcttaatagtgaatt

SEQ ID NO: 112 - DNA, 292 bp, Mouse
gtggggtcccagacttgccaaccaaagggccattcctggtatatggttctggcttcagctctggtggcatggactatggtatggttggtggcaaggaggctgggaccgagtctcgcttcaaacagtggacctcaatgatggaagggctgccatctgtggccacacaagaagccaccatgcacaaaaacggcgctatagtggcccctggtaagacccgaggaggttcaccatacaaccagtttgatataatcccaggtgacacactgggtggccatacgggtcctgctggtga

SEQ ID NO: 113 - DNA, 255 bp, Mouse
ttagatgacttaggactttaatgttttccatgcagtcgattgaaaacactgatacatgaacaaccagaaaaagacctcagcaatgtatagacctggaatatatagtgttgccctggttaaactacaagaacagccacgtgatcacagtttgagggtggaaggcaggggtgtgactgagttttgtttaacggcctaaccgaaaagcaaagaatcaaccatttcttctacttgtggcaagaaacgagagtcatggtg

SEQ ID NO: 114 - DNA, 197 bp, Mouse
gacccacatgtgaacagccgcgtgtatgtcacactgctctgtgtgtgatttcttcacgtgtgcatgtgcgctcttggtctttccacttattgcctcgttcgtaagaaaccaaccataaggtgccaaggaggttttattccttttttttttaaagatgacaaatgtacagatgttagtacagatgttaatgtacagat

SEQ ID NO: 115 - DNA, 205 bp, Mouse
aaaacatttcacaaaacagcaaaacaaaattgatacaatcaaaaaaacaacactataaccaacataggtgaaaacagccaaacacataatgtacaatctggtgttccaggacaaacatctgtcatatacatggtatatacatatatactttttcactcaatatattatgacaatatatatttaaaattttgttatagacaaaaaa

SEQ ID NO: 116 - DNA, 202 bp, Mouse
cctccctcatcctctacttcccttttccttcctgcttgattttctcattccagacccctatgcacacacacacacacacacacacacacacacgaacacacgcacacacacacacacacgcacacacacactgtccatccatagttacttatttagttttccattcctagagagatctaatcatcccctagtcagtgcctaa

SEQ ID NO: 117 - DNA, 240 bp, Mouse
ccgccaggagaggagatacacagccagtgatgtggaccaccggatggctgttgctgctgccgcttctgctgtgtgaaggagcgcaagccctggagtgctacagctgcgtgcagaaggcggacgatggatgcgctccgcacaggatgaagacagtcaaatgtggtcccggggtggacgtctgtaccgaggccgtgggagcggtagagaccatccacgggcaattctctgtggcggtgcggg

SEQ ID NO: 118 - DNA, 527 bp, Human
ccgtcagtctagaaggataagagaaagaaagttaagcaactacaggaaatggctttgggagttccaatatcagtctatcttttattcaacgcaatgacagcactgaccgaagaggcagccgtgactgtaacacctccaatcacagcccagcaaggtaactggacagttaacaaaacagaagctcacaacatagaaggacccatagccttgaagttctcacacctttgcctggaagatcataacagttactgcatcaacggtgcttgtgcattccaccatgagctagagaaagccatctgcaggtgttttactggttatactggagaaaggtgtgagcacttgactttaacttcatatgctgtggattcttatgaaaaatacattgcaattgggattggtgttggattactattaagtggttttcttgttattttttactgctatataagaaagaggtgtctaaaattgaaatcgccttacaatgtctgttctggagaaagacgaccactgtgaggcctttgtgaaga

SEQ ID NO: 119 - DNA, 655 bp, Rat
atggcgcgccccgcgccctggtggtggctgcggccgctggcggcgctcgccctggcgctggcgctggtccgggtgccctcagcccgggccgggcagatgccgcgccccgcagagcgcgggcccccagtacggctcttcaccgaggaggagctggcccgctacagcggcgaggaggaggatcaacccatctacttggcagtgaagggagtggtgttcgatgtcacctctgggaaggagttttatggacgtggagccccctacaacgccttggccgggaaggactcgagcagaggtgtggccaagatgtcgctggatcctgcagacctcactcatgacatttctggtctcactgccaaggagctggaagccctcgatgacatcttcagcaaggtgtacaaagccaaataccccattgttggctacacggcccgcaggatcctcaacgaggatggcagccccaacctggacttcaagcctgaagaccagccccattttgacataaaggacgagttctaatgtctagctgagaagctggttctagggagaggtgaggggacaggagttaaatgtcccacggaacaagcaggggaagcctctgagtgctctgcatctgaataaaactgatatttaactgggaaaaaaaaaaaaaaaaaaa

SEQ ID NO: 120 - protein, 176 aa, Rat
MVPCFLLSLLLLVRPAPVVAYSVSLPASFLEEVAGSGEAEGSSASSPSLLPPRTPAFSPTPGRTQPTAPVGPVPPTNLLDGIVDFFRQYVMLIAVVGSLTFLIMFIVCAALITRQKHKATAYYPSSFPEKKYVDQRDRAGGPHAFSEVPDRAPDSRQEEGLDFFQQLQADILACYS

SEQ ID NO: 121 - protein, 116 aa, Rat
MELLYWCLLCLLLPLTSRTQKLPTRDEELFQMQIRDKALFHDSSVIPDGAEISSYLFRDTPRRYFFMVEEDNTPLSVTVTPCDAPLEWKLSLQELPEESSADGSGDPEPLDQQKQQ

SEQ ID NO: 122 - protein, 64 aa, Human [sequence omitted]

SEQ ID NO: 123 - protein, 68 aa, Human
MLTLPILVCKVQDSNRRKMLPTQFLFLLGVLGIFGLTFAFIIGLDGSTGPTRFFLFGILFSICFSCLL

SEQ ID NO: 124 - protein, 110 aa, Mouse
MISPAWSLFLIGTKIGLFFQVAPLSVVAKSCPSVCRCDAGFIYCNDRSLTSIPVGIPEDATTLYLQNNQINNVGIPSDLKNLLKVQRIYLYHNSLDEFPTNLPKYVKELH

SEQ ID NO: 125 - protein, 330 aa, Mouse
MGSPRLAALLLSLPLLLIGLAVSARVACPCLRSWTSHCLLAYRVDKRFAGLQWGWFPLLVRKSKSPPKFEDYWRHRTPASFQRKLLGSPSLSEESHRISIPSSAISHRGQRTKRAQPSAAEGREHLPEAGSQKCGGPEFSFDLLPEVQAVRVTIPAGPKASVRLCYQWALECEDLSSPFDTQKIVSGGHTVDLPYEFLLPCMCIEASYLQEDTVRRKKCPFQSWPEAYGSDFWQSIRFTDYSQHNQMVMALTLRCPLKLEASLCWRQDPLTPCETLPNATAQESEGWYILENVDLHPQLCFKFSFENSSHVECPHQSGSLPSWTVSMDTQ

SEQ ID NO: 126 - protein, 37 aa, Rat
MLWVLLSLTPLLSPLIFFPVKTVALEEISTICRADVL

SEQ ID NO: 127 - protein, 42 aa, Mouse
MGSPISGVCPVLPGGLFVALGWIFLLFHRDAFSLHTMSAGFP

SEQ ID NO: 128 - protein, 253 aa, Mouse
MMYWIVFAIFMAAETFTDIFISWSGPRIGRPWGWEGPHHHHHLASGSHKPLPLLTHRFPFYYEFKMAFVLWLLSPYTKGASLLYRKFVHPSLSRHEKEIDACIVQAKERSYETMLSFGKRSLNIAASAAVQAATKSQGALAGRLRSFSMQDLRSIPDTPVPTYQDPLYLEDQVPRRRPPIGYRPGGLQGSDTEDECWSDNEIVPQPPVRPREKPLGRSQSLRVVKRKPLTREGTSRSLKVRTRKKAMPSDMDS

SEQ ID NO: 129 - protein, 40 aa, Mouse
MKAMALSLGASPVLAFLLSGYSDGYQVCSRFGSKVPQFLN

SEQ ID NO: 130 - protein, 87 aa, Mouse
MIAVTFAIVLGVIIYRISTAAALAMNSSPSVRSNIRVTVTATAVIINLVVIILLDEVYGCIARWLTKIGECHVQDSIGSMGLGQGQP

SEQ ID NO: 131 - protein, 70 aa, Mouse
MFGLVHVCTCVCVCVCVCVCVCICSCGYVHVPCGCVCLWGPEVRYLPLSLHPGGFCFVLFCFGPGLSLIS

SEQ ID NO: 132 - protein, 63 aa, Mouse
MWLLVALTLSVYSLVAFVTGMLCDTVVIKMLMSLHKSSKLNPRAKCGGVPLIPALWGQVQVVL

SEQ ID NO: 133 - protein, 39 aa, Mouse
MDNTLSIIIYLLFIFAISVLDSQLSTRCLWWFSKDLEVT

SEQ ID NO: 134 - protein, 90 aa, Rat
MPTMWPLLHVLWLALVCGSVHTTLSKSDAKKAASKTLLEKTQFSDKPVQDRGLVVTDIKAEDVVLEHRSYCSARARERNFAGEVLGICHS

SEQ ID NO: 135 - protein, 193 aa, Rat
MTSGPGGPAAATGGGKDTHQWYVCNREKLCESLQSVFVQSYLDQGTQIFLNNSIEKSGWLFIQLYHSFVSSVFTLFMSRTSINGLLGRGSMFVFSPDQFQRLLKINPDWKTHRLLDLGAGDGEVTKIMSPHFEEIYATELSETMIWQLQKKKYRVLGINEWQNTGFQYDVISCLNLLDRCDQPLTLLKDIRMS

SEQ ID NO: 136 - protein, 106 aa, Rat
MAAPMDRTHGGRAARALRRALALASLAGLLLSGLAGALPTLGPGWRRQNPEPPASRTRSLLLDAASGQLRLEYGFHPDAVAWANLTNAIRETGWAYLDLGTNGSYK

SEQ ID NO: 137 - protein, 286 aa, Rat
MAAAMPLGLSLLLLVLVGQGCCGRVEGPRDSLREELVITPLPSGDVAATFQFRTRWDSDLQREGVSHYRLFPKALGQLISKYSLRELHLSFTQGFWRTRYWGPPFLQAPSGAELWVWFQDTVTDVDKSWKELSNVLSGIFCASLNFIDSTNTVTPTASFKPLGLANDTDHYFLRYAVLPREVVCTENLTPWKKLLPCSSKAGLSVLLKADRLFHTSYHSQAVHIRPICRNAHCTSISWELRQTLSVVFDAFITGQGKKEACPLASQSLVYVDITGYSQDNETLEVS

SEQ ID NO: 138 - protein, 198 aa, Rat
MTVFRKVTTMISWMLLACALPCAADPMLGAFARRDFQKGGPQLVCSLPGPQGPPGPPGAPGSSGMVGRMGFPGKDGQDGQDGDRGDSGEEGPPGRTGNRGKQGPKGKAGAIGRAGPRGPKGVSGTPGKHGIPGKKGPKGKKGEPGLPGPCSCGSSRAKSAFSVAVTKSYPRERLPIKFDKILMNEGGHYNASSGKFVC

SEQ ID NO: 139 - protein, 233 aa, Rat
MASALEELQKDLEEVKVLLEKSTRKRLRDTLTNEKSKIETELRNKMQQKSQKKPEFDNEKPAAVVAPLTTGYTVKISNYGWDQSDKFVKIYITLTGVHQVPAENVQVHFTERSFDLLVKNLNGKNYSMIVNNLLKPISVESSSKKVKTDTVIILCRKKAENTRWDYLTQVEKECKEKEKPSYDTEADPSEGLMNVLKKIYEDGDDDMKRTINKAWVESREKQAREDTEFLQPG

SEQ ID NO: 140 - protein, 38 aa, Human
MGLALCLASAGISGSRSAFLGVPRPRPTLIKLIDTVDL

SEQ ID NO: 141 - protein, 322 aa, Mouse
MDARWWAVVVLATLPSLGAGGESPEAPPQSWTQLWLFRFLLNVAGYASFMVPGYLLVQYLRRKNYLETGRGLCFPLVKACVFGNEPKAPDEVLLAPRTETAESTPSWQVLKLVFCASGLQVSYLTWGILQERVMTGSYGATATSPGEHFTDSQFLVLMNRVLALVVAGLYCVLRKQPRHGAPMYRYSFASLSNVLSSWCQYEALKFVSFPTQVLAKASKVIPVMMMGKLVSRRSYEHWEYLTAGLISIGVSMFLLSSGPEPRSSPATTLSGLVLLAGYIAFDSFTSNWQDALFAYKMSSVQMMFGVNLFSCLFTVGSLLEQG

SEQ ID NO: 142 - protein, 312 aa, Mouse
MLCLCLYVPIAGAAQTEFQYFESKGLPAELKSIFKLSVFIPSQEFSTYRQWKQKIVQAGDKDLDGQLDFEEFVHYLQDHEKKLRLVFKSLDKKNDGRIDAQEIMQSLRDLGVKISEQQAEKILKSMDKNGTMTIDWNEWRDYHLLHPVENIPEIILYWKHSTIFDVGENLTVPDEFTVEERQTGMWWRHLVAGGGAGAVSRTCTAPLDRLKVLMQVHASRSNNMCIVGGFTQMIREGGAKSLWRGNGINVLKIAPESAIKFMAYEQMKRLVGSDQETLRIHERLVAGSLAGAIAQSSIYPMEVLKTRMALRK

SEQ ID NO: 143 - protein, 163 aa, Rat
MPLVTTLFYACFYHYTESEGTFSSPVNLKKTFKIPDRQYVLTALAARAKLRAWNDVDALFTTKNWLGYTKKRAPIGFHRVVEILHKNSAPVQILQEYVNLVEDVDTKLNLATKFKCHDVVIDTCRDLKDRQQLLAYRSKVDKGSAEEEKIDVILSSSQIRWKN

SEQ ID NO: 144 - protein, 330 aa, Rat
MAGWAGAELSVLNPLRALWLLLAAAFLLALLLQLAPARLLPSCALFQDLIRYGKTKQSGSRRPAVCRAFDVPKRYFSHFYVVSVLWNGSLLWFLSQSLFLGAPFPSWLWALLRTLGVTQFQALGMESKASRIQAGELALSTFLVLVFLWVHSLRRLFECFYVSVFSNTAIHVVQYCFGLVYYVLVGLTVLSQVPMNDKNVYALGKNLLLQARWFHILGMMMFFWSSAHQYKCHVILSNLRRNKKGVVIHCQHRIPFGDWFEYVSSANYLAELMIYISMAVTFGLHNVTWWLVVTYVFFSQALSAFFNHRFYKSTFVSYPKHRKAFLPFLF

SEQ ID NO: 145 - protein, 301 aa, Rat
MLVAFLGASAVTASTGLLWKKAHAESPPSVNSKKTDAGDKGKSKDTREVSSHEGSAADTAAEPYPEEKKKKRSGFRDRKVMEYENRIRAYSTPDKIFRYFATLKVINEPGETEVFMTPQDFVRSITPNEKQPEHLGLDQYIIKRFDGKKIAQEREKFADEGSIFYTLGECGLISFSDYIFLTTVLSTPQRNFEIAFKMFDLNGDGEVDMEEFEQVQSIIRSQTSMGMRHRDRPTTGNTLKSGLCSALTTYFFGADLKGKLTIKNFLEFQRKLQRCLLGLPVWEGSPHLPTGHWLRELWSLL

SEQ ID NO: 146 - protein, 61 aa, Rat
MENIYYTNLITILGNKHANQMELNLQALILSPWFAVCAPPGFARDQAVRGLALAGRRITVV

SEQ ID NO: 147 - protein, 105 aa, Rat
MLRRQLVWWHLLALLFLPFCLCQDEYMESPQAGGLPPDCSKCCHGDYGFRGYQGPPGPPGPPGIPGNHGNNGNNGATGHEGAKGEKGDKGDLGPRGERGQHGPKG

SEQ ID NO: 148 - protein, 210 aa, Rat
MLGATSLSWPWVLWAVAQRDSVDAIGMFLGGLVATIFLDIIYISIFYSSVAVGDTGRFSAGMAIFSLLLQALLLLPRLPHAPGSEGVSSRSARISSDLLRNIVPTRQLTRQTHLQTPLQAWRTRAKLPPGGTEAVPGRPGAQQDACHLLYWTYNGVSSIPCHRGGLSHVPSEVPAEKSPVLILHAAPPFKTPVNPWARTVVGFFPSSPSL

SEQ ID NO: 149 - protein, 301 aa, Rat; identical to SEQ ID NO: 145

SEQ ID NO: 150 - protein, 80 aa, Human
MKLSGMFLLLSLALFCFLTGVFSQGGQVDCGEFQDTKVYCTRESNPHCGSDGQTYGNKCAFCKAIVKSGGKISLKHPGKC

SEQ ID NO: 151 - protein, 27 aa, Mouse
MLKASLHILFLGILNVPIVDTSTKTGV

SEQ ID NO: 152 - protein, 86 aa, Mouse
MLQGPAPSCFWVFSGICVFWDFIFIIFFNVLSLGNREISAKDFADQPAGAQGMWGIWGHTITCGLAPGAKPCSLKREGPDLLSFPP

SEQ ID NO: 153 - protein, 72 aa, Mouse
MSAIFNFQSLLTVILLLICTCAYIRSLAPSILDRNKTGLLGIFWKCARIGERKSPYVAICCIVMAFSILFIQ

SEQ ID NO: 154 - protein, 169 aa, Mouse
MSGLRTLLGLGLLVAGSRLPRVISQQSVCRARPIWWGTQRRGSETMAGAAVKYLSQEEAQAVDQELFNEYQFSVDQLMELAGLSCATAIAKAYPPTSMSKSPPTVLVICGPGNNGGDGLVCARHLKLFGYQPTIYYPKRPNKPLFTGLVTQCQKMDIPFLGEMPPEDGM

SEQ ID NO: 155 - protein, 61 aa, Mouse
MEKQMDASVSVIFGSIVISAFLYLSLAGPWAVTVTQMRTIIITMDQLRDALILDQLKVAVS

SEQ ID NO: 156 - protein, 131 aa, Mouse
MAPSLWKGLVGVGLFALAHAAFSAAQHRSYMRLTEKEDESLPIDIVLQTLLAFAVTCYGIVHIAGEFKDMDATSELKNKTFDTLRNHPSFYVFNHRGRVLFRPSDATNSSNLDALSSNTSLKLRKFDSLRR

SEQ ID NO: 157 - protein, 133 aa, Mouse
MRLLAAALLLLLLALCASRVDGSKCKCSRKGPKIRYSDVKKLEMKPKYPHCEEKMVIVTTKEHVQGTGARSTACTLSCRAPNASSSGTMPGTRSAGSTKNRVDDHGKKNSRPVERLQQRTLQIKIKALSFSQA

SEQ ID NO: 158 - protein, 78 aa, Mouse
GTRKPLPMEAHSRREKASGLRLAWHYECSGVSVWWMCVLGWLSFLVFLLFSLVCSFPSPINHSHMLPCLFLRGGGSNV

SEQ ID NO: 159 - protein, 206 aa, Mouse
MLPPAIHLSLIPLLCILMRNCLAFKNDATEILYSHVVKPVPAHPSSNSTLNQARNGGRHFSSTGLDRNSRVQVGCRELRSTKYISDGQCTSISPLKELVCAGECLPLPVLPNWIGGGYGTKYWSRRSSQEWRCVNDKTRTQRIQLQCQDGSTRTYKITVVTACKCKRYTRQHNESSHNFESVSPAKPAQHHRERKRASKSSKHSLS

SEQ ID NO: 160 - protein, 169 aa, Mouse; identical to SEQ ID NO: 154

SEQ ID NO: 161 - protein, 114 aa, Mouse
MSVTIGRLALFLIGILLCPVAPSLTRSWPGPDTCSLFLQHSLSLSLRLGQSLEGGLSVCFHVCIHACECVACCRVLWDPKPRGSSLCRWVLGSITCLFMYEVGGWTQGGLIVSL

SEQ ID NO: 162 - protein, 46 aa, Mouse
MHYPCLACLFVNVHWCFAWMCILVKMSELLELELETMVSCLVDVGN

SEQ ID NO: 163 - protein, 122 aa, Mouse
MFTFVVLVITIVICLCHVCFGHFKYLSAHNYKIEHTETDAVSSRSNGRPPTAGAVPKSAKYIAQVLQDSEGDGDGDGAPGSSGDEPPSSSSQDEELLMPPDGLTDTDFQSCEDSLIENEIHQ

SEQ ID NO: 164 - protein, 60 aa, Rat
MSFVKIEATPTQTKWPFSVVPQSLLVTVYICYIFLVIFFFFFEACQEVLCSFFDFSRRRG

SEQ ID NO: 165 - protein, 57 aa, Mouse
MGSPISGVCPVLPGGLFVALGWIFLLFHRDAFSLHTMSAGFPKSPANPHHPPLRLSP

SEQ ID NO: 166 - protein, 75 aa, Mouse
KTRRTLTGQLGLFSVDFMVCIFLFLFFCFLFPFPLFLVRKHILLSHCKQWEGSTMTHTHTHTHIHIHTPPRQCQS

SEQ ID NO: 167 - protein, 52 aa, Mouse
VRSLEQLGLFSVDFMVCIFLFLFFCFLFPFPLFLVRKHILLSHCKQWEGSTM

SEQ ID NO: 168 - protein, 119 aa, Rat
MLGATSLSWPWVLWAVAQRDSVDAIGMFLGGLVATIFLDIIYISIFYSSVAVGDTGRFSAGMAIFSLLLQALLLLPRLPHAPGSEGVSSRSARISSDLLRNIVPTRQLTRQTHLQTPLQ

SEQ ID NO: 169 - protein, 104 aa, Rat
  VARIANT (1)...(104): Xaa = Any Amino Acid
LVPKSARASLLCCGPKLAACGIVLSAWGVIMLIMLGIFFNVHSAVXIXDVPFTEKDFENGPQNIYNLYEQVSYNCFIAAGLYLLXGGFSFCQVRLNKRKEYMVR

SEQ ID NO: 170 - protein, 123 aa, Rat
  VARIANT (1)...(123): Xaa = Any Amino Acid
MRPGADWAAVCALWPSWRPSCSLPSSXRIQPDELWLYRNPYVKAEYFPTGPMFVIAFLTPLSLIFFAKFLRKADADRQRASLPRCQPCPSAKWCLYQHHKTDSXQGHAQIASTECSPXGIAHS

SEQ ID NO: 171 - protein, 75 aa, Rat
SAGVMTAAVFFGCAFIAFGPALSLYVFTIATDPLRVIFLIAGAFFWLVSLLLSSVFWFLVRVITDNRDGPVQNYL

SEQ ID NO: 172 - protein, 79 aa, Human
KTSYHYHTNVEELTIPETRNNLYISISWLWCLVLVLLSTMILNKHGWMKANAYSLVPSIIYSPSYLKLLLRLYKLQICC

SEQ ID NO: 173 - protein, 134 aa, Human [sequence omitted]

SEQ ID NO: 174 - protein, 137 aa, Human
AWSRPRYDSVLALSAALQATRALMVVSLVLGFLAMFVATMGMKCTRCGGDDKVKKARIAMGGGIIFIVAGLAALVACSWYGHQIVTDFYNPLIPTNIKYEFGPAIFIGWAGSALVILGGALSPVPVLGIRAGLGTCP

SEQ ID NO: 175 - protein, 43 aa, Human
MKLSGMFLLLSLALFCFLTGVFSQGGQVDCGESRTPRPTALGN

SEQ ID NO: 176 - protein, 63 aa, Rat
PNTRPRRHTACRVSISVFYMLHTELKKCWFFLFCFSLFLWFCFWFCFLLPRFDYLPMPSTRPR

SEQ ID NO: 177 - protein, 52 aa, Mouse
MLQGPAPSCFWVFSGICVFWDFIFIIFFNVLSLGNREISAKDFADQPAGAQG

SEQ ID NO: 178 - protein, 62 aa, Mouse
VSPRPTYPSTASSMAAFLVTGFFFSLFVVLGMEPRALFRPDKALPLSCAKPTSLCVQSSFLG

SEQ ID NO: 179 - protein, 123 aa, Mouse
ASRTAVMSLCRCQQGSRSRMDLDVVNMFVIAGGTLAIPILAFVASFLLWPSALIRIYYWYWRRTLGMQVRYAHHEDYQFCYSFRGRPGHKPSILMLHGFSAHKGHVAQRGQVPSRKNLHFGCV

SEQ ID NO: 180 - protein, 120 aa, Mouse
  VARIANT (1)...(120): Xaa = Any Amino Acid
ARRRXRWRRGCCWLIGTGLRAATWTVLCSPNSSLVVARHTKSFPPKKPLQALTMSIMDHSPTTGVVTVIVILIAIAALGGLILGCWCYLRLQRISQSEDEESIVGDGETKEPFYWCSTLL

SEQ ID NO: 181 - protein, 60 aa, Mouse
KGPEVSCCIKYFIFGFNVIFWFLGITFLGIGLWAWNEKGVLSNISSITDLGGFDPVWLFL

SEQ ID NO: 182 - protein, 72 aa, Mouse
KPTVGSAEVAIAVFLVICIIVVLTILGYCFFKNQRKEFHSPLHHPPPTPASSTVSTTEDTEHLVYNHTTQPL

SEQ ID NO: 183 - protein, 716 aa, Rat
ELYLDGNQFTLVPKELSNYKHLTLIDLSNNRISTLSNQSFSNMTQLLTLILSYNRLRCIPPRTFDGLKSLRLLSLHGNDISVVPEGAFGDLSALSHLAIGANPLYCDCNMQWLSDWVKSEYKEPGIARCAGPGEMADKLLLTTPSKNFTCQGPVDVTIQAKCNPCLSNPCKNDGTCNNDPVDFYRCTCPYGFKGQDCDVPIHACTSNPCKHGGTCHLKPRRETWIWCTCADGFEGESCDINIDDCEDNDCENNSTCVDGINNYTCLCPPEYTGELCEEKLDFCAQDLNPCQHDSKCILTPKGFKCDCTPGYIGEHCDIDFDDCQDNKCKNGAHCTDAVNGYTCVCPEGYSGLFCEFSPPMVFLRTSPCDNFDCQNGAQCIIRVNEPICQCLPGYLGEKCEKLVSVSILVNKESYLQIPSAKVRPQTNITLQIATDEDSGILLYKGDKDHIAVESIEGIRASYDTGSHPASAIYSVETINDGNFHIVELLTLDSSLSLSVDGGSPKIITNLSKQSTLNFDSPLYVGGMPGKNNVASLRQAPGQNGTSFHGCIRNLYINSELQDFRKVPMQTGILPGCEPCHKKVCAHGTCQPSSQSGFTCECEEGWMGPLCDQRTNDPCLGNKCVHGTCLPINAFSYSCKCLEGHGGVLCDEEEDLFNPLPGDQVQAREVQALWARAALLWMQQWIHRGQLTQRISCRGERIRDYYQSSRVRCLSND

SEQ ID NO: 184 - protein, 340 aa, Mouse
DGSLWLQATQPDDAGHYTCVPSNGFLHPPSASAYLTVLYPAQVTVMPPETPLPTGMRGVIRCPVRANPPLLFVTWTKDGQALQLDKFPGWSLGPEGSLIIALGNEDALGEYSCTPYNSLGTAGPSPVTRVLLKAPPAFIDQPKEEYFQEVGRELLIPCSARGDPPPIVSWAKVGRGLQGQAQVDSNNSLVLRPLTKEAQGRWECSASNAVARVTTSTNVYVLGTSPHVVTNVSVVPLPKGANVSWEPGFDGGYLQRFSVWYTPLAKRPDRAHHDWVSLAVPIGATHLLVPGLQAHAQYQFSVLAQNKLGSGPFSEIVLSIPEGLPTTPAAPGLPATRSRV

SEQ ID NO: 185 - protein, 536 aa, Mouse
KVEGEGRGRWALGLLRTFDAGEFAGWEKVGSGGFGQVYKVRHVHWKTWLAIKCSPSLHVDDRERMELLEEAKKMEMAKFRYILPVYGICQEPVGLVMEYMETGSLEKLLASEPLPWDLRFRIVHETAVGMNFLHCMSPPLLHLDLKPANILLDAHYQMSRFLDFGLAKCNGMSHSHDLSMDGLFGTIGYLPPERIREKSRLFDTKHDVYSFAIVIWGVLTQNNPFADEKNILHIMMKVVKGHRPELPPICRPRPRACASLIGLMQRCWHADPQVRPTFQEITSETEDLCEKPDEEVKDLAHEPGEKSSLESKSEARPESSRLKRASAPPFDNDCSLSELLSQLDSGIFPRLLKGPEELSRSSSECKLPSSSSGKRLSGVSSVDSAFSSRGSLSLSFEREASTGDLGPTDIQKKKLVDAIISGDTSRLMKILQPQDVDLVLDSSASLLHLAVEAGQEECVKWLLLNNANPNLTNRKGSTPLHMAVERKGRGIVELLLARKTSVNAKDEDQWTALHFAAQNGDEGQHKAAAREECFCQ

SEQ ID NO: 186 - protein, 335 aa, Rat
RFGYQMDEGNQCVDVDECATDSHQCNPTQICINTEGGYTCSCTDGYWLLEGQCLDIDECRYGYCQQLCANVPGSYSCTCNPGFTLNDDGRSCQDVNECETENPCVQTCVNTYGSFICRCDPGYELEEDGIHCSDMDECSFSEFLCQHECVNQPGSYFCSCPPGYVLLEDNRSCQDINECEHRNHTCTPLQTCYNLQGGFKCIDPIVCEEPYLLIGDNRCMCPAENTGCRDQPFTILFRDMDVVSGRSVPADIFQMQATTRYPGAYYIFQIKSGNEGREFYMRQTGPISATLVMTRPIKGPRDIQLDLEMITVNTVINFRGSSVIRLRIYVSQYPF

SEQ ID NO: 187 - protein, 152 aa, Mouse
MALGVLIAVCLLFKAMKAALSEEAEVIPPSTAQQSNWTFNNTEADYIEEPVALKFSHPCLEDHNSYCINGACAFHHELKQAICRCFTGYTGQRCEHLTLTSYAVDSYEKYIAIGIGVGLLISAFLAVFYCYIRKRCINLKSPYIICSGGSPL

SEQ ID NO: 188 - protein, 118 aa, Rat
LVPQFGTRIRYTAYDRAYNRASCKFIVKVQVRRCPILKPPQHGYLTCSSAGDNYGAICEYHCDGGYERQGTPSRVCQSSRQWSGSPPVCTPMKINVNVNSAAGLLDQFYEKQRLLIVS

SEQ ID NO: 189 - protein, 299 aa, Human
MGTKAQVERKLLCLFILAILLCSLALGSVTVHSSEPEVRIPENNPVKLSCAYSGFSSPRVEWKFDQGDTTRLVCYNNKITASYEDRVTFLPTGITFKSVTREDTGTYTCMVSEEGGNSYGEVKVKLIVLVPPSKPTVNIPSSATIGNRAVLTCSEQDGSPPSEYTWFKDGIVMPTNPKSTRAFSNSSYVLNPTTGELVFDPLSASDTGEYSCEARNGYGTPMTSNAVRMEAVERNVGVIVAAVLVTLILLGILVFGIWFAYSRGHFDRTKKGTSSKKVIYSQPSARSEGEFKQTSSFLV

SEQ ID NO: 190 - protein, 91 aa, Human [sequence omitted]

SEQ ID NO: 191 - protein, 89 aa, Mouse
GAWAMLYGVSMLCVLDLGQPSVVEEPGCGPGKVQNGSGNNTRCCSLYAPGKEDCPKERCICVTPEYHCGDPQCKICKHYPCQPGQRVEV

SEQ ID NO: 192 - protein, 299 aa, Mouse
ARAGACYCPAGFLGADCSLACPQGRFGPSCAHVCTCGQGAACDPVSGTCICPPGKTGGHCERGCPQDRFGKGCEHKCACRNGGLCHATNGSCSCPLGWMGPHCEHACPAGRYGAACLLECSCQNNGSCEPTSGACLCGPGFYGQACEDTCPAGFHGSGCQRVCECQQGAPCDPVSGRCLCPAGFRGQFCERGCKPGFFGDGCLQQCNCPTGVPCDPISGLCLCPPGRAGTTCDLDCRRGRFGPGCALRCDCGGGADCDPISGQCHCVDSYTGPTCREVPTQLSSIRPAPQHSSSKAMKH

SEQ ID NO: 193 - protein, 314 aa, Mouse
EEPCNNGSEILAYNIDLGDSCITVGNTTTHVMKNLLPETTYRIRIQAINEIGVGPFSQFIKAKTRPLPPSPPRLECAASGPQSLKLKWGDSNSKTHAAGDMVYTLQLEDRNKRFISIYRGPSHTYKVQRLTEFTCYSFRIQAMSEAGEGPYSETYTFSTTKSVPPTLKAPRVTQLEGNSCEIFWETVPPMRGDPVSYVLQVLVGRDSEYKQVYKGEEATFQISGLQSNTDYRFRVCACRRCVDTSQELSGAFSPSAAFMLQQREVMLTGDLGGMEEAKMKGMMPTDEQFAALIVLGFATLSILFAFILQYFLMK

SEQ ID NO: 194 - protein, 109 aa, Mouse
GTRVGTPYYMSPERIHENGYNFKSDIWSLGCLLYEMAALQSPFYGDKMNLYSLCKKIEQCDYPPLPSDHYSEELRQLVNICINPDPEKRPDIAYVYDVAKRMHACTAST

SEQ ID NO: 195 - protein, 237 aa, Mouse
MLSLRSLLPHLGLFLCLALHLSPSLSASDNGSCVVLDNIYTSDILEISTMANVSGGDVTYTVTVPVNDSVSAVILKAVKEDDSPVGTWSGTYEKCNDSSVYYNLTSQSQSVFQTNWTVPTSEDVTKVNLQVLIVVNRTASKSSVKMEQVQPSASTPIPESSETSQTINTTPTVNTAKTTAKDTANTTAVTTANTTANTTAVTTAKTTAKSLAIRTLGSPLAGALHILLVFLISKLLF

SEQ ID NO: 196 - protein, 154 aa, Human
MALGVPISVYLLFNAMTALTEEAAVTVTPPITAQQGNWTVNKTEAHNIEGPIALKFSHLCLEDHNSYCINGACAFHHELEKAICRCFTGYTGERCEHLTLTSYAVDSYEKYIAIGIGVGLLLSGFLVIFYCYIRKRCLKLKSPYNVCSGERRPL

SEQ ID NO: 197 - protein, 171 aa, Rat
MARPAPWWWLRPLAALALALALVRVPSARAGQMPRPAERGPPVRLFTEEELARYSGEEEDQPIYLAVKGVVFDVTSGKEFYGRGAPYNALAGKDSSRGVAKMSLDPADLTHDISGLTAKELEALDDIFSKVYKAKYPIVGYTARRILNEDGSPNLDFKPEDQPHFDIKDEF

SEQ ID NO: 198 - DNA, 1399 bp, Mouse
ggcaaagacttcggcacgagasaacagcaaagcagagctggctgcagccattcactggcctcgggcgggcgtgccacagaggcagttgaagtgaaagtgaaagagaaacgataagagaacggagaccacaggtgctaagtgagggtgctcacagaaccccctcttcagccagagatcactagcaggggaactgtggagaaggcagccagcaaggaagagcctgagagtagcctccatgggcttggagcccagctggtatctgctgctctgtttggctgtctctggggcagcagggactgaccctcccacagcgcccaccacagcagaaagacagcggcagcccacggacatcatcttagactgcttcttggtgacagaagacaggcaccgcggggcttttgccagcagtggggacagggagagggccttgcttgtgctgaagcaggtaccagtgctggatgatggctccctggaaggcatcacagatttccaggggagcactgagaccaaacaggattcacctgttatctttgaggcctcagtggacttggtacagattccccaggcagaggcgttgctccatgctgactgcagcgggaaggcagtgacctgcgagatctccaagtatttcctccaggccagacaagaggccacttttgagaaagcacattggttcatcagcaacatgcaggtttctagaggtggccccagtgtctccatggtgatgaagactctaagagatgctgaagttggagctgtccggcaccctacactgaacctacctctgagtgcccagggcacagtgaagactcaagtggagttccaggtgacatcagagacccaaaccctgaaccacctgctggggtcctctgtctccctgcactgcagtttctccatggcaccagacctggacctcactggcgtggagtggcggctgcagcataaaggcagcggccagctggtgtacagctggaagacagggcaggggcaggccaagcgcaagggcgctacactggagcctgaggagctactcagggctggaaacgcctctctcaccttacccaacctcactctaaaggatgaggggacctacatctgccagatctccacctctctgtatcaagctcaacagatcatgccacttaacatcctggctccccccaaagtacaactgcacttggcaaacaaggatcctctgccttccctcgtctgcagcattgccggctactatcctctggatgtgggagtgacgtggattcgagaggagctgggtggaattccagcccaagtctctggtgcctccttctccagcctcaggcagagcacgatgggaacctacagcatttcttccacggtgatggctgacccaggccccacaggtgccacttatacctgccaa

SEQ ID NO: 199 - DNA, 469 bp, Rat
ggggcgctggccagtcatggcggagccttgggctgggcagtttctgcaagctttgcccgccacggtgctcggagcgctgggcaccctgggcagcgagtttctgcgggagtgggagacacaagatatgcgagtgactctcttcaagcttctcctgctttggttggtgttaagtctcctgggcatccagctggcgtgggggttctacgggaacacagtgaccgggttgtatcaccgtccagggaaatggcagcaaatgaagctctcaaaactcacagagaataaaggaaggcagcaggagaagggtctccagagatatcgctgggtctgctggctcctgtgctgtaccttgctgctatccagaccccttaggcaactgcagagggcttgggttgggggactggagtaccatgatgctcccagggtgagcctccactgccctcagccttgcctccaacagcgtcaggtactg

SEQ ID NO: 200 - DNA, 529 bp, Mouse; identical to SEQ ID NO: 24

SEQ ID NO: 201 - DNA, 1230 bp, Mouse; identical to SEQ ID NO: 25

SEQ ID NO: 202 - DNA, 778 bp, Mouse; identical to SEQ ID NO: 27

SEQ ID NO: 203 - DNA, 1123 bp, Mouse; identical to SEQ ID NO: 28

SEQ ID NO: 204 - DNA, 434 bp, Mouse; identical to SEQ ID NO: 32

SEQ ID NO: 205 - DNA, 783 bp, Mouse
aattcggcacgaggctagtcgaatgtccgggctgcggacgctgctggggctggggctgctggttgcgggctcgcgcctgccacgggtcatcagccagcagagtgtgtgtcgtgcaaggcccatctggtggggaacacagcgccggggctcggagaccatggcgggcgctgcggtgaagtacttaagtcaggaggaggctcaggccgtggaccaagagctttttaacgagtatcagttcagcgtggatcaactcatggagctggccgggttgagctgtgccacggctattgccaaggcttatccccccacgtctatgtccaagagtcccccgactgtcttggtcatctgtggccccggaaataacggaggggatgggctggtctgtgcgcgacacctcaaactttttggttaccagccaactatctattaccccaaaagacctaacaagcccctcttcactgggctagtgactcagtgtcagaaaatggacattcctttccttggtgaaatgcccccagaggatgggatgtagagaagggaaaccctagcggaatccaaccagacttactcatctcactgacggcacccaagaagtctgcaactcactttactggccgatatcattaccttgggggtcgctttgtaccacctgctctagagaagaagtaccagctgaacctgccatcttaccctgacacagagtgtgtctaccgtctacagtaagggaggtgggtaggcaggattctcaataaagacttggtactttctgtcttgaaaaaaaaa

SEQ ID NO: 206 - DNA, 480 bp, Mouse
aaatgaaaactcttggarctcgcgcgcctgcaggtcgacactagtggatccaaagaattcggcacgagttaaggttttcagactttatttcatggtatttgacattgacacatactgagttagtaacaagataccatgcagctccctctagcctcggatcaccgaagcaggaagaaggtcagactgcccccatcccagatttgcttagtttgtctcccaatgtgctggactttaaagacagggaatggagaagcagatggatgcttcagtttcagtcatttttggctctatagtgatctctgccttcctgtacctgtccttggctggaccctgggcagtaactgtcactcagatgaggacgatcatcattacaatggaccaactgagggatgccctcatattagaccaattaaaagttgctgtgagttaaaccaggaatgaccgcacttccacatcagaaatcaaacaaaatcaatggtt

SEQ ID NO: 207 - DNA, 501 bp, Mouse; identical to SEQ ID NO: 37

SEQ ID NO: 208 - DNA, 480 bp, Mouse; identical to SEQ ID NO: 39

SEQ ID NO: 209 - DNA, 962 bp, Mouse; identical to SEQ ID NO: 40

SEQ ID NO: 210 - DNA, 778 bp, Mouse
ggcacgaggctagtcgaatgtccgggctgcggacgctgctggggctggggctgctggttgcgggctcgcgcctgccacgggtcatcagccagcagagtgtgtgtcgtgcaaggcccatctggtggggaacacagcgccggggctcggagaccatggcgggcgctgcggtgaagtacttaagtcaggaggaggctcaggccgtggaccaagagctttttaacgagtatcagttcagcgtggatcaactcatggagctggccgggttgagctgtgccacggctattgccaaggcttatccccccacgtctatgtccaagagtcccccgactgtcttggtcatctgtggccccggaaataacggaggggatgggctggtctgtgcgcgacacctcaaactttttggttaccagccaactatctattaccccaaaagacctaacaagcccctcttcactgggctagtgactcagtgtcagaaaatggacattcctttccttggtgaaatgcccccagaggatgggatgtagagaagggaaaccctagcggaatccaaccagacttactcatctcactgacggcacccaagaagtctgcaactcactttactggccgatatcattaccttgggggtcgctttgtaccacctgctctagagaagaagtaccagctgaacctgccatcttaccctgacacagagtgtgtctaccgtctacagtaagggaggtgggtaggcaggattctcaataaagacttggtactttctgtcttgaaaaaaaaa

SEQ ID NO: 211 - DNA, 1152 bp, Mouse; identical to SEQ ID NO: 42

SEQ ID NO: 212 - DNA, 446 bp, Mouse; identical to SEQ ID NO: 43

SEQ ID NO: 213 - DNA, 2728 bp, Mouse
ggggagggagggccctgttttggcggagcagggcgcgcggctgggcccctgaagtggagcgagagggaggcgcttcgccgggtgccactgccggggaggctcgtcgggacccagcgccggtcgcggctccctcaggatcgatgcaccgcggttaacccgtgaggaggcggcggccggggaagatggtgttgccgacagtgttaattctgctcctctcctgggcggcggggctgggaggtgagacacgaccccgggcggcgacggagcggcggtcggtcgggccgagcgcacgtcgcggagccgggccgcgcgtgtcaggtctcctcggcttctgtcagctctctcagctcgcctcagccgaccccgagcgacgctccccgcgcgctattgtccctcgcgcgccccgaccgcgctcccgccggcggccctgcctgcccggcttctcgcgccgctttccccgggagcggcggagcccaggccagccgccctcgcgcactccgcagccacctcagccctgccggggtccgagccccgggaccgcgcagactcgcagcaacttgcgaggttggcagcgcggcgggagcattgttctgcaagcgagcgagcggacccgggccgggtgtcggacgccggtgtgcgtgtcccacccgagtgccttccctccgcctcgtgctcttttcggagtgtttgtagccagcgcgccggaggttgtgtgtgtgtgtgtgtctgtcgttctgtctgtctgtcttctgtctccccggggcaagactttagttgactgaggagaagggcaagccgttttaggatgctcttcgatccatctgtctttttgagttgagtccacagagaagcaagaccgacccttcctgggcgaaccaacttgcagagttttcttaaactctcaggtggagcagacgtactgcttagtcagaggattgtcagggctgtgctccctccccctgcaaattggagttcactgttgcttcaagtttcctgatgcttcgggtttgagacagcggtatttcattcccaggctttcctaggacaggttgcatgattattttgttcctatgagaaagtgctttaccataggtaagctaatttgccgcccaagtgtctggagagaggttagcttaaaagcattgaattggaaacaacccccagaacttccaggggtgcttcggatggttgtcagcagcctaatttgatactttagaaaatatcctagtgttttctgtagtgtattgtctgtgttcatccctttgtctcattgacttaaactgcaggacccagcctatttttgtctggcattctgcttactctgaagttggttttgtgtactcagtttctgttgttgtgtgtactattcatttattaagtacacattttagatgacagccactaatagatgcttatttttgttttgtttttgttttttgttttttttaagaaccagattgcagaccgtttgtaaagagcctctttatttaacatttgtatttctgtaacacggcttatagtcctggctggctgttttcactttttgtgattatggtcaggaattagacactgttctctatgaggtaataaaatctaagttaaatgtgatacactttgataacgtagtgatacaaaatgccttttattaaggaaaactaaaaccaatgtggcctgttgtttggggaaaaaagtaaattaacagcataagcattgtgggtgaagagttttattcagatctttggagtttctttctgcactaagtaatgattcaaaggccaggttttgttgtgcttctgctaaaaacttaaaaaaaaaaataaaagttttcacttaagtattatgtcaaatttgtaatacttgagtatgtaggtatatttataatttggggctgtggaatgtagcccagtggcaattgcctagcaaggccatgcaaggctttggattcaacatctctgtttaaggcccaaaactcctcctatgtttatttgtaactcattatactatatgctgggttttttttttttatctgaactgaatcgcatatagctaagtttatatatttttgtgatgttttgtaggctagtgtgcattcaaacttagtagatattggctgtagtgcattggaaagttgaaatgtttgtaaggttagggtagttgtagaaatacagaactttaaggtataagccatgttcaggtgaaactaaactctgttggttgctttcatcttgcctgtttgtgttaatcactgttgtgtgtgaatgtttttcttactgcacataatgtgaggggtgggaagctggaaggaggcaataaagtgcttaaatactaaaacaacttttctagttttcccttctatgttggtggatgtcctgcccagtgttgtatttgtagaaagataccatgatagtttttgagtttatgaagtgtctgtatggaagtattcatatatctgtacaaaatgcttctaaaaagttatttgttgcctagcaaaatggctcagtaggtgggagcacttgctttgaaagcctgactatctgatttctagtccccatccctttagttgaaggagagaaccaactcctgaaaattatcttttgaccttcacatgcacaccatggttcctcgtgcccttactcacacatgtacactacacacaattataagataataaagttatttggagacgtgttaggaacttattggcactatcctgattagccacaatttt

SEQ ID NO: 214 - DNA, 2046 bp, Rat
cggtatcgataagcttgatatcgaattcctgcaggtcgacactagtggatccaaagaattcggcacgagaaaataaccaaccaaacaaactttcctcttcccgctagaaaaaacaaattctttaaggatggagctgctctactggtgtttgctgtgcctcctgttaccactcacctccaggacccagaagctgcccaccagagatgaggaactttttcagatgcagatccgggataaggcattgtttcacgattcatccgtgattccagatggagctgaaatcagcagttacctatttagagatacacctagaaggtatttcttcatggttgaggaagataacaccccactgtcagtcacagtgacaccttgtgatgcgcctttggaatggaagcttagcctccaggagctgcctgaggagtccagtgcagatgggtcaggtgacccagaaccacttgaccagcagaagcagcagatgactgatgtggagggcacagaactgttctcctacaagggcaatgatgtagagtattttctgtcttcaagttccccatctggtttgtatcagttggagcttctttcaacagagaaagacacacatttcaaagtatatgccaccaccactccagaatctgatcaaccataccctgacttaccatatgaccccagagttgatgtgacctctattggacgtaccacagtcactttggcctggaagcaaagccccacagcttctatgctgaaacaacccatagagtactgtgtggtcatcaacaaggagcacaatttcaaaagcctttgtgcagcagaaacaaaaatgagtgcagatgatgccttcatggtggcgcccaaacctggcctagactttagcccctttgactttgcccatttcggatttccaacagataatttgggtaaggatcgcagcttcctggcaaagccttctcccaaagtggggcgccatgtctactggaggcctaaggttgacataaaaaaaatctgcataggaagtaaaaatattttcacagtctccgacctgaagcccaatacccagtactactttgatgtcttcatggtcaataccaacactaacatgaacacagcttttgtgggtgcctttgccaggaccaaggaggaggcaaaacagaagacagtggagctcaaagatgggagggtcacagatgtggtcgttaaaaggaaagggaaaaagtttctacggtttgctccagtctcctctcaccaaaaagtcaccctctttattcactcttgtatggacactgttcaagtccaagtgagaagagatgggaagctgcttctgtcacagaatgtggaaggcattcggcagttccagttaagaggaaaacccaaaggaaagtacctcattcgactgaaaggcaacaagaaaggagcatcaatgttgaaaatactagccaccaccaggcccagtaagcacgcattcccctctcttcctgatgacacaagaatcaaagcctttgacaagctacgcacttgctcttcagtcacggtggcttggcttggcacccaagagaggagaaagttttgtatctacagaaaggaagtgggtggaaactacagtgaagagcagaagagaagagagagaaaccagtgcctaggaccagacaccagaaagaagtcagagaaggttctttgcaagtacttccacagccaaaacctgcagaaagcagtgacgacagagacaatcagagatctgcaacctggcaagtcttacctactggacgtttatgttgtaggacatgggggacactctgtgaagtatcagagtaaacttgtgaaaacaaggaaggtctgttagttaccttaagtgaagatcagtagaactcccggagagatatggaatcacactgcctgttactgactactctcatgacaaacagaagttgtacttgaaagaaaggataacaacatgtgtacattgatgcctgtgtaatgtaacgtggagacttgtattcacgcacacctgtggtacttagggtccatctgtctaatgctggctaatgtcaaagg

SEQ ID NO: 215 - DNA, 493 bp, Mouse
cccacccagcagaagatcctctaccaatgaatgctgactgagcctgcccaactttttgtgcacaagaagaaccagccaccttcacacagcagcctccggcttcactttaggaccctagcaggagcactggccctttcttcaacacagatgagttggggactacagattctcccctgcctgagcctaatccttcttctttggaaccaagtgccagggcttgagggtcaagagttccgatttgggtcttgccaagtgacaggggtggttctcccagaactgtgggaggccttctggactgtgaagaacactgtgcaaactcaggatgacatcacaagcatccggctgttgaagccgcaggttctgcggaatgtctcggtaatcagatgggaaggggatagctagctctctaagaggggctgatgggagtcgttcccttctgctctgatccctatacaggacaaggctgagcatgaggcaaagtggtctctgtctg

SEQ ID NO: 216 - DNA, 511 bp, Mouse
gggcatagtgctggagtagatgagaattctatgtcatgttcccaaggcaaccaggagaagattgtcttccaggtagcttggagaagggtctcagagtgatgcatttcctccaatgcccactccaacagggctatttccctggccaagcatattcaaaccaccacagtgactaaaggccaagtggatggatgtctggtctgggttgccactggagaccttgtggatatatgaggctgtgctgccttggctgctgatggggcaggggcatgcctgggtctgtggtcctattgcactctgggtctttgttaatgtcccaggcttatgttaccaccaaaagccattcagatgcccctggtctggattgctgcccgaagcactgtgctagccctgcctcttgctgaccaccacactcagaagagctgtccctacctcttgcctgggcagcacaatagagctgaccctgatgaagtggaagcactggtgaactggctccctccttcatctactgtag

SEQ ID NO: 217 - DNA, 1107 bp, Rat
cggcatctcaagctgctgcaagcaggactgagcactaccagagcagcaacctcggatggccctggacgtggcacgcgcggggcacagaggcaagaagacttgatgaagcctctcttcccaacccatatccagaaagaacgatttagatgacagtttttagaaaggtgaccaccatgatctcctggatgctcttggcctgtgcccttccgtgtgctgctgacccaatgcttggtgcctttgctcgcagggacttccagaagggtggtcctcaactggtgtgcagtctgcctggtccccaaggcccacctggccctccaggagcaccaggatcctcaggaatggtgggaagaatgggttttcctggtaaggatggccaagacggccaggacggagaccgaggggacagtggagaagaaggtccacctggcaggacaggcaaccgaggaaaacaaggaccaaagggcaaagctggggccattgggagagcgggtcctcgaggacccaagggggtcagtggtacccccgggaaacatggtataccgggcaagaagggacctaagggcaagaaaggggaacctgggctcccaggcccctgtagctgcggcagtagccgagccaagtcggccttttcggtggcggtaaccaagagttacccacgtgagcgactgcccatcaagtttgacaagattctgatgaatgagggaggccactacaatgcatccagtggcaagttcgtctgcagcgtgccagggatctattactttacctatgacattacgctggccaacaaacacctggccatcggcctagtgcacaatggccagtaccgcattcggacttttgacgccaacaccggcaaccacgacgtggcctcgggctccaccatcctagctctcaaggagggtgatgaagtctggttacagattttctactcggagcagaatggactcttctacgacccttattggaccgacagcctgttcaccggcttcctcatctacgctgatcaaggagaccccaatgaggtatagacaagctggggttgagccgtccaggcagggactaagattccgcaagggtgctgatagaagaggatctctgaactga

SEQ ID NO: 218 - DNA, 1001 bp, Rat
ggagcaagaagcaacccgaagctaggagtctgtcagcgagggcaggggctgcctggttggggtaggagtgggagcagggccagcaggagggtctgaggaagccattcaaagcgagcagctgggagagctggggagccgggaagggcctacagactacaagagaggatcctggcgtctgggcctcctgggtcatcaccatgaggccacttcttgccctgctgcttctgggtctggcatcaggctctcctcctctggacgacaacaagatccccagcctgtgtcccgggcagcccggcctcccaggcacaccaggccaccacggcagccaaggcctgcctggccgtgacggccgtgatggccgcgacggtgcacccggagctccgggagagaaaggcgagggcgggagaccgggactacctgggccacgtggggagcccgggccgcgtggagaggcaggacctgtgggggctatcgggcctgcgggggagtgctcggtgcccccacgatcagccttcagtgccaagcgatcagagagccgggtacctccgccagccgacacacccctacccttcgaccgtgtgctgctcaatgagcagggacattacgatgccactaccggcaagttcacctgccaagtgcctggtgtctactactttgctgtccatgccactgtctaccgggccagcctacagtttgatcttgtcaaaaatggccaatccatagcttctttcttccagttttttggggggtggccaaagccagcctcgctctcagggggtgcgatggtgaggctagaacctgaggaccaggtatgggttcaggtgggtgtgggtgattacattggcatctatgccagcatcaaaacagacagtaccttctctggatttctcgtctattctgactggcacagctccccagtcttcgcttaaaatacagtgaacccggagctggcacttgctcctagtggagggtgtgacattggtccagcgcgcataccagga

SEQ ID NO: 219 - DNA, 2206 bp, Rat
gtttcgtcttaacgccctctctgcgttggcagaactggccgtgggctcccgctggtaccatggaacatctcagcccacacagactaagcggagactgatgttggtggcgttcctcggagcatccgcggtgactgcaagtaccggtctcctgtggaagaaggctcacgcagaatctccaccgagcgtcaacagcaagaagactgacgctggagataaggggaagagcaaggacacccgggaagtgtccagccatgaaggaagcgctgcagacactgcggccgagccttacccagaggagaagaagaagaagcgttctggattcagagacagaaaagtaatggagtatgagaataggatccgagcctactccacaccagacaaaatcttccggtattttgccaccttgaaagtaatcaacgaacctggtgaaactgaagtgttcatgaccccacaggactttgtgcgctccataacacccaatgagaagcagccagaacacttgggcctggatcagtacataataaagcgcttcgatggaaagaaaattgcccaggaacgagaaaagtttgctgacgaaggcagcatcttctatacccttggagagtgtggactcatctccttctctgactacatcttcctcacaacggtgctctccactcctcagagaaatttcgaaattgccttcaagatgtttgacttgaatggagatggagaagtagacatggaggagtttgagcaggttcaaagcatcattcgctcccagaccagcatgggcatgcgtcacagagatcgtccaactactgggaacaccctcaagtctggcttatgttcggccctcacgacctacttttttggagctgatctcaaagggaaactgaccattaaaaacttcctggaatttcagcgtaaactgcagcatgacgttctaaagctggagtttgaacgccatgacccggtagacgggagaatctctgagaggcagttcggtggcatgctgctggcctacagtggagtgcagtccaagaagctgaccgccatgcagaggcagctgaagaagcacttcaaggatgggaagggcctgactttccaggaggtggagaacttcttcactttcctgaagaacattaatgacgtggacactgcgttaagcttttaccacatggctggagcatccctcgataaagtgaccatgcagcaagtggccaggacagtggcgaaagtcgagctgtcggaccacgtgtgtgacgtggtgtttgcactctttgactgcgacggcaatggggagctgagcaataaggagtttgtctccatcatgaagcagcggctgatgagaggcctggagaagcccaaggacatgggctttacccgtctcatgcaggccatgtggaaatgtgcccaagaaaccgcctgggactttgctctacccaaatagtaccccacctcctgcaccttagcaccccgcaatcctggagtggccttcatgctgctgatgcttctgggagtagtgcccacatccccatctttctggaagtgacctctggcctcagctggctgacctctccatcctcccctgacccagtcagtgttccgctaggctctgaatctgcagtcagatcaaaggtctaagacaggaacaagtcttcaaagcagagaccatagctcccttaaccagtgccccgtgggtaaatgcggggagccctcccacactggcagccccaggaggcatctctgcagtctctcactgtggatttaagtaacacaaacgtccctgccatcttcctcccactgttttaaagctgcaagtttggaaatactctggcaggcaaagggaagtctgtgatgaacggtaatgcagatgaccctggtaccctgatctggcagggcacctggtcaggggaagggtctgcgtcagacaccagcggcaccaggaaggctctttgccaccagcacagctcccgattcaaagtcgctgctttgagcggctctccagaacctcctgctcttttttttttcctcccggctccctgcgatgcctcctctgggactctgcttcactagagccagggctgagcccctgttccttgtgtcttgtcccctctctatagacctgcagagcgcagctcagagcctatctgccctctgtctaatacactcgtaaatatcactttaattatagcactttgcaggaaataccccaaaaaaaaaa

SEQ ID NO: 220 - DNA, 376 bp, Human
atcggcatcaccttctacaacaagtggctgacaaagagcttccatttccccctcttcatgacgatgctgcacctggccgtgatcttcctcttctccgccctgtccagggcgctggttcagtgctccagccacagggcccgtgtggtgctgagctgggccgactacctcagaagagtggctcccacagctctggcgacggcgcttgacgtgggcttgtccaactggagcttcctgtatgtcaccgtctcgctgtgagtactggccatgccctgctgcctcccttcaggctgaagctgtctgtctgtccagcggggtgtctgcacacccggctgctaggccagccactccaccactctgggaccagcccttgctctct

SEQ ID NO: 221 - DNA, 433 bp, Human
agcttcttctcagagcaaacagtaagcaacagaaaatatacatttgatgaaacattctttgcattagagaaacatgaaaataaatataattcaaggaagtataatgattctctaatatgtctttctcagacctgtactagtttaccggttcaagaagctctcatcacatttttcacttgtattttacatattgctattcgggtaattcaaataaaatgcaggtcttgtaaaagaataaaaacattgacaagtatgcatgtgccagggaccaaattagagggttctttggtgcagttagtccaaattctcagatttgaaggataatatgtaccaataaaaaaaaaatctgctgctagacatttacagcagtgctctgtcttgcttcacattagaaatcgaaaacagctgttctcaacaagccaattttattttt

SEQ ID NO: 222 - DNA, 530 bp, Human
gtttcaagcctgtaatcatagcgttgggaatgctaaggcagaatcccatagttgagggcagcctgagttagatagagaaacactgccaaactcaaaaatattcagtctgaggatgacttaatattgactttgtaagaagtatactcttggaaataggtgctaagcaaatagtgtttgggacctctaagcttatgtgaccggagttttactcttttgtccttaattttctcattttcttttgactggtgaaaagttgcagtgtaagttagaatttggctcgaagcctgcttccttagttgaatgccctgtgttttgtttttttttttttttttgagcacttcaaaaagtatgatatatagttccttaatgttaggactctatataccttcagaggcatgtgtgttgggattgaaattcaaattctgatcatgtgaaaatggcactagttgttagaggaagtctctccttcaatctcagcatttacttacatactaactgaagagaaaatcacgtctcctagttctttgtaa

SEQ ID NO: 223 - DNA, 550 bp, Mouse
aagctgctggttttaaatatttactttcccaggaggtgggtttcttcaggtgtttgtttaaagagggctgtcacaggtgaatggtttggggaacccttcttggcagagttttagctgccttactgaacattgtcccaacagaaagttcctatcgttctccttccttcttggcaggcttcaggttttgctgcagcccctggagccaacattttggttgtgggaggctgacctcttgcctgcctccttgtgtggacagagtggtgaagacgtattcctcacctccttgcctttcagtaaatggccacgatgtgactatttgttgaggtttccagcctcttccaagaccttgccaggctgagtggggcctgagagcttgcaggcacttaaagcttcctggcaaaggggccggccacaggcagagggaaaggaacaggtcagaggcgttgctctggcagaggcggctcgggctgcccatcgtgtttctgcggggttgaggtgggctcccttctttgtagatgcctttcctctcgtaataacaactccttgcccc

SEQ ID NO: 224 - DNA, 470 bp, Mouse
aggcctgttcaccaccactcctgttctccgctaagcttttctttggcttttggtggtttgttttttgttactgttattcaacagttcagcctaattataccatggcagagaacgagccttttatgtttgggctgtgccactgaactgtttactgtagcgtgtgggtgaaggtggaactaatgggctcagtccttacctcctgcttctgtgtaggaggctcagccgaggcttggaactggctaccttcagccagcagtcttttcccctgctgtatagcaacccttctacccttgcttttcttgcttcctcatcttcactcaaccttaagcagagttcaaagactcaacttcaacattggtcatctgggtgtgtatttatatgtgaataatgatatcagatccagagtaacacctttgctgtcttcttaggatgggtgagtgcacggggctcgggctctttgctgaatactt

SEQ ID NO: 225 - DNA, 1752 bp, Rat
ggcacgagctgacatgaagccccctagacccagagattggttcctgctgtgacatgcctaccatgtggccacttcttcatgtcctctggcttgctctggtctgtggctctgttcacaccaccctgtcaaagtcagatgccaaaaaagctgcctcaaagacgctgctggaaaagactcagttttcggataaacctgtccaagaccggggtctggtggtgacggacatcaaagctgaggatgtggttcttgaacatcgtagctactgctcagcaagggctcgggagagaaactttgctggagaggtcctaggctatgtcactccatggaacagccatggctatgatgttgccaaggtctttgggagcaagttcacacagatctcaccagtctggttgcagctgaagagacgtggtcgggagatgtttgaaatcacaggcctccatgatgtggaccaagggtggatgcgagctgtcaagaagcatgccaaaggcgtgcgcatagtgcctcggcttctgtttgaagactggacttacgatgatttccgaagcgtcctagacagtgaggatgagatagaagagctcagcaagactgtggtacaggtggcaaagaaccagcattttgacggctttgtggtggaggtctggagccagttgctgagccagaaacatgtaggcctcattcacatgcttactcacttggctgaggcgctgcaccaggccaggctgctggtcattctggtcatcccacctgctgtcacccctgggactgaccagctgggcatgtttacacacaaggagtttgagcagctggcccccatactagatggcttcagcctcatgacatacgactactccacatcacagcagcctggccctaatgctccattgtcatggatccgagcctgtgttcaggtcctagaccccaagtcacagtggcgtagcaagatcctcctgggattgaacttctatggcatggattatgcagcctccaaggatgcccgtgagcctgtcattggagccagggcagttttgaaggtggctctgccattggctgtctcatcccagcagatctggacattgggaagaggagggtccaccagtgccctactcctggcaggcttggggctggcctcagagccctgtacaaagagcgaggaggttccaaagaagagcctcttagatacagtttggcactggcagggagagccaggagcactgtgtagaggtcgtcttcacacctggatcctagtgagcgcggtcccgcaggcctgcacatgcctgtttcagtgatggcctcacgaggcagcaccggctctagctgcactgctttctttgattagctttggccatgggagacacaggtagcagcatagcgggtcaggaacctcttgagcagatccaaccaaaggctttttgtcacttgccagctctgcatggtcagcctgtgacaccgtctcactcaaggccttctggagttggccctcagctcagatgtcatgtgagggataccctaaggagatgatggggctccctcttgcctgagcttgcaggattggatcttgggcagatcagggcagtggaaacgtcagaccttctacccgtacatacagacgctgaaggaccacaggccccgtgtggtatgggacagccaggctgcggaacacttctttgagtacaagaagaatcgcggcgggaggcacgttgtcttctacccaacgctgaagtctctgcaggtgcggctggagctagccag

SEQ ID NO: 226 - DNA, 2165 bp, Mouse
ggcacgagcctgctgccctcttgcagacaggaaagacatggtctctgcgcccggatcctacagaagctcatggggagccccagactggcagccttgctcctgtctctcccgctactgctcatcggcctcgctgtgtctgctcgggttgcctgcccctgcctgcggagttggaccagccactgtctcctggcctaccgtgtggataaacgttttgctggccttcagtggggctggttccctctcttggtgaggaaatctaaaagtcctcctaaatttgaagactattggaggcacaggacaccagcatccttccagaggaagctgctaggcagcccttccctgtctgaggaaagccatcgaatttccatcccctcctcagccatctcccacagaggccaacgcaccaaaagggcccagccttcagctgcagaaggaagagaacatctccctgaagcagggtcacaaaagtgtggaggacctgaattctcctttgatttgctgcccgaggtgcaggctgttcgggtgactattcctgcaggccccaaggccagtgtgcgcctttgttatcagtgggcactggaatgtgaagacttgagtagcccttttgatacccagaaaattgtgtctggaggccacactgtagacctgccttatgaattccttctgccctgcatgtgcatagaggcctcctacctgcaagaggacactgtgaggcgcaaaaagtgtcccttccagagctggcctgaagcttatggctcagacttctggcagtcaatacgcttcactgactacagccagcacaatcagatggtcatggctctgacactccgctgcccactgaaactggaggcctccctctgctggaggcaggacccactcacaccctgcgaaacccttcccaacgccacagcacaggagtcagaaggatggtatatcctggagaatgtggacttgcacccccagctctgctttaagttctcatttgaaaacagcagccacgttgaatgtccccaccagagtggctctctcccatcctggactgtgagcatggatacccaggcccagcagctgacgcttcacttttcttcgaggacatatgccaccttcagtgctgcctggagtgacccaggtttggggccggatacccccatgcctcctgtgtacagcatcagccagacccagggctcagtcccagtgacgctagacctcatcatccccttcctgaggcaggagaattgcatcctggtgtggaggtcagatgtccattttgcctggaagcacgtcttgtgtcctgatgacgccccttaccctactcagctgttgctccggtccctaggctccggtcgaacaaggccagttttactcctacatgcagcggactcagaggcacagcgacgcctggtgggagctttggccgaactgctgcggacggcgctgggaggtggacgcgacgtgatcgtggatctctgggaagggacgcacgtagcacgcattggaccactgccgtggctttgggcagcgcgggagcgcgtggcgcgggagcagggcacagtgctgctcctgtggaactgtgcgggtcccagcaccgcctgcagcggtgacccgcaggctgcgtcccttcgcaccttgttgtgcgctgctccacgtccgctgctgctcgcctacttcagtcgcctctgcgccaaaggtgacatcccccggccgctgcgcgctctgccacgctaccgcctgcttcgtgacctgccgcgcctgctgagagcactggatgctcagcctgccaccctagcctccagctggagtcaccttggggctaagcggtgcttgaaaaaccgtctggagcagtgtcacctgctggaacttgaggctgccaaagatgactaccaaggctcaaccaatagtccctgtggtttcagctgtctgtagcctcagcctgtgtagcaacagcaggaactccagaatgaggcctcacacatgtactctttgggggtgcttcttgtcccccaaaccgtaagactcaccttaagtcccacacttgaccaacctccctcacatttgctccctcttagagttcctgagaggaacttgggctttcctgataggtcctcagccctttctgagaaggagggacgatttttccatttcttttcaaaactgaaaaaaaaaaa

SEQ ID NO: 227 - DNA, 1348 bp, Mouse
  misc_feature (1)...(1348): n = A,T,C or G
caaagaattcggcacgagaccggcctcactatgtctgccattttcaattttcagagtctgttgactgtaatcttgctgcttatatgtacatgtgcttatatccgatccctggcacccagcatcctggacagaaataaaactggactattgggaatattttggaagtgtgcccgaattggggaacgcaagagtccttatgtcgccatatgctgtatagtgatggccttcagcatcctcttcatacagtagctttggaaactaccagcatgtgcttgctatcagactgtaaacaaggacttgcctccagaaaataatgggaagaatggttaagccatttgtctctgaacatggaatgagataaacttcaagatgctgttctctatttttatgctattggaccaatgagctgaatgaataattaagatgtaacagttcaatacacaggaatgtgattgtatccatcaacctcagttctctcactccagtattacattctgcaaatgtcattctgttgtgtcaggactgcttttcataaggttcttcgggcacgaagtagaaacccagtggcaaattccaaggctcctttgactagggcttcaaaataatgtcttcacagaatggtacctctagcgactgtcctattnttattgagaaaaaaacttgttctatttttgttgttgttactgttcttatggattgcattcatatttaaaccctttggattgctaaccagagtacctctattcttggcaaattccgcagtttattacaggtgtttaaagtattttaaacaaaactctgaatttctttagttagcctaagagttggcttctagtcacaaagatacagctgccacactgtgacgaagagcaccttagaaagaaaagcagcaagtgagcggtgagcaagtaagcaccgtgcagtcttcgtgcaagtaagcaccgtgcagtcttcgttctctgtagtcttgtcttccaaatagaacgtccatcgtagttacccaaaggtggtatttgtggtgttcttaatgcagtgctttaagtctagtgtatgttctgtcagcttgaactggaatctctcttgtaactttgtaggttataaacatatctcatatctgctttagtctgggtactatgctctaagtacatttcagctttgacacagaatgtgaatagacgaatatcaaaggatacttacaagtttgtatccaacatttcttcaggttcagctgaaaatcagttactgtttcaaaacaaagaggaattaaatcctagctgaaaactatacatagcatttattaattaattactgggtttaactgctctttttaaaagtttgaaaaaaaaaa

SEQ ID NO: 228 - DNA, 2296 bp, Mouse
  misc_feature (1)...(2296): n = A,T,C or G
ctggagctcgcgcgcctgcaggtcgacactagtggatccaaagcttaaaagagactccacccactccagtagaccggggactaaaacagaaattctgagaaagcagcaagaagcagaagaaatagctatttcacagcagtaacagaagctacctgctataataaagacctcaacactgctgaccatgatcagcccagcctggagcctcttcctcatcgggactaaaattgggctgttcttccaagtggcacctctgtcagttgtggctaaatcctgtccatctgtatgtcgctgtgacgcaggcttcatttactgtaacgatcgctctctgacatccattccagtgggaattccggaggatgctacaacactctaccttcagaacaaccaaataaacaatgttgggattccttccgatttgaagaacttgctgaaagtacaaagaatatacctataccacaacagtttagatgaattccctaccaaccttccaaagtatgtcaaagagttacatttgcaagagaataacataaggactatcacctatgattcactttcgaaaattccgtatctggaagagttacacttggatgataactcagtctcggctgttagcatcgaagagggagcatttcgagacagtaactatctgcggctgctttttctgtcccgtaaccaccttagcacaatcccggggggcttgcccaggactattgaggaattacgcctggatgacaatcgcatatcaacgatctcttccccatcacttcatggtctcacaagcctgaaacgcctggttttagatggaaacttgttgaacaaccatggtttgggtgacaaagttttcttcaacttagtaaacttaacagagctgtccctggtgaggaattccttgacagcagcgccagtgaaccttcccggcacaagcctgaggaagctttaccttcaagacaaccatatcaaccgggtacccccaaatgctttttcttatttaaggcagctgtatcgactcgatatgtctaataataacctaagcaatttacctcagggtatctttgatgatttggacaatataacccaactgattcttcgcaacaatccttggtattgtggatgcaagatgaaatgggtacgagactggttacagtcgctaccggtgaaggtcaatgtgcgtgggctcatgtgccaagccccagaaaaggtccgtggaatggctatcaaggacctcagtgcagaactgtttgattgtaaagacagtgggattgtgagcaccattcagataaccactgcaatacccaacacagcatatcctgctcaaggacagtggccagctcctgtgaccaaacaaccagatattaaaaaccccaagctcattaaggatcagcgaactacaggcagcccctcacggaaaacaattttaattactgtgaaatctgtcacccctgacacaatccacatatcctggagacttgctctgcctatgactgctctgcgactcagctggcttaaactgggccatagcccagcctttggatctataacagaaacaatcgtaacaggagaacgcagtgaatacttggtcaccgccctagaacctgaatcaccctatagagtatgcatggttcccatggaaaccagtaacctttacctgtttgatgaaacacctgtttgtattgagacccaaactgcccctcttcgaatgtacaaccccacaaccaccctcaatcgagagcaagagaaagaaccttacaaaaatccaaatttacctttggctgccatcattggtggggctgtggccctggtaagcatcgccctccttgctttggtgtgttggtatgtgcataggaacgggtcactgttttcacggaactgtgcgtacagcaaagggcggaggagaaaggatgactatgcagaagccggtactaagaaagacaactccatcctggaaatcagggaaacttctttccagatgctaccgataagcaatgaacccatctccaaggaggagtttgtaatacacaccatatttcctccgaatgggatgaatctgtacaagaacaacctcagtgagagcagtagtaaccggagctacagagacagtggcatcccagactcggaccactcacactcatgatgcaaggaggtcccacaccagactgttccgggtttttttttaaaaaacctaagaaaggtgatggtaggaactctgttctactgcaaaacactggaaaagagactgagagaagcaatgtacntgtacatttgccatataatttatatttaagaactttttatt

SEQ ID NO: 229 - DNA, 1704 bp, Rat
  misc_feature (1)...(1704): n = A,T,C or G
ccaaagaattcggcacgaggcggctcgggatggcggcccccatggaccggacccatggtggccgggcagcccgggcgctgcggcgggctctggcgctggcctcgctggccgggctattgctgagcggcctggcgggtgctctccccaccctcgggcccggctggcggcgccaaaaccccgagccgccggcctcccgcacccgctcgctgctgctggacgccgcttcgggccagctgcgcctggagtacggcttccaccccgatgcggtggcctgggctaacctcaccaacgccatccgcgagactgggtgggcctatctggacctgggcacaaatggcagctacaagtggatcccccgggctgcaggcctatgcagctggtgtggtggaggcctctgtgtccgaggagctcatctacatgcactggatgaacacggtggtcaattactgcggccccttcgagtacgaagtcggctactgtgagaagctcaagagcttcctggaggccaacctggagtggatgcagagggaaatggagcttagcccggactcgccatactggcaccaggtgcggctgaccctcgggctgcagctgaagaggcctggaggacagctatgaaggccgtttaaccttcccaactgggaggttcaacatcaaacccttggggttcctcctgctgcaggaatctctggagatctggaagacctagagacagccctgaataagaccaacgaccaagcgcttccgtgggctccggttcgtgctctgccctcatcaagctgctgcccggcagccatgatctcctggtggctcacaacacttggaactcctaccagaacatgttacgcatcatcatggagtcccccgggctgcagttccgggaggggccgcaagaaggagtaccccctgattgccggcaacaacttgattttttcgtcttacccgggcaccatcttctccggtgatgacttctacatcctgggcagtgggctggtcaccctggagaccaccaatcggcaacaaagaacccaagcgctgtggaagtacgtgcaaccccagggctgtgtgctggagtggattcgaaacattgtggccaacccgcctggccttggatggggccacctgggcagatgtcttcaggcggttcaatagtggcacgtataataaccagtggatgattgtggactacaaggcattcatccccaatgggcccagccctggaagccgggtgctcaccatcctagaacagatcccgggcatggtggtggtggcatcccccgggctgcaggaattcgatatcaagcttatcgatacacgtcgaaccctcgagccaagatcttccagagggaccagtcactagtagaggacgtagacaccatggtccggctcatgaggtacaatgacttccttcatgaccctctgtcgttgtgtgaggcctgcagcccgaagcccaacgcagagaacgccatctctgccccgctctgatctcaaccctgctaantggctcctacccatttcaggccctgcgtcagcgcgcccatggcggcattgatgtgaaggtgaccagcgttgcactggctaagtacatgagcatgctggcagccagtggccccacgtgggaccagttgccaccgttccagtggagtaaatcaccattccacaacatgctgcacatgggccaagcctgatctttggatgttctca

SEQ ID NO: 230 - DNA, 2004 bp, Rat
ctcgaggtcgacggtatcgataagcttgattaattaaccctcactaaagggaacaaaagctggagctcgcgsgctgcaggtcgacactagtggatccaaagaattcggcacgaggcggaagcagccgcaggtatggcggctgccatgccgctgggtttatcgttgctgttgctggtgctagtggggcagggctgctgtggccgcgtggagggcccacgcgacagcctgcgagaggaactcgttatcactccgctgccttccggcgacgtggccgccacattccagttccgcacgcgttgggattccgatctgcagcgggaaggagtgtcccattacaggctcttccctaaagccctgggacagttgatctccaagtactctctgcgggagctacacctgtcattcacgcaaggcttttggaggacccgatactgggggccacccttcctgcaggctccatcaggtgcagagctctgggtctggttccaagacactgtcacagatgtggataagtcttggaaggagctcagtaatgtcctctcagggatcttctgcgcgtccctcaacttcatcgactccaccaataccgtcactcccacagcctccttcaaacctctggggctggccaatgacactgaccactacttcctgcgctatgctgtgctgccccgggaggtcgtctgcaccgagaatctcacgccgtggaagaagctcctgccctgtagctccaaggcagggctgtccgtgctactgaaagcagatcgattgttccacaccagttaccactcccaggcagtgcatatccggccaatctgcagaaatgctcactgcaccagtatctcctgggagctgaggcagaccctttcagttgtctttgatgccttcatcaccggacaggggaagaaagactggtctctcttccgcatgttctcccggactctcacagaggcctgtccattggcatctcagagcctagtttatgtggacatcacaggctacagccaggacaacgaaacactggaggtgagccctcccccaacttccacataccaggatgtcattttgggcaccaggaagacctatgccgtctatgacttgtttgacacagccatgatcaataactcccgaaacctcaacatccagctcaaatggaagagacccccagataatgaagccctgcccgtgcccttcctgcatgcacagcggtacgtgagtggttatgggctacagaagggcgagctgagcaccctgttgtacaactctcatccttaccgggccttccctgtgctgctactggatgctgtgccctggtacctgcggctgtatgtgcacaccctcaccatcacctccaagggcaaggataataaaccaagttatatccactaccagcctgcccaggaccggcagcagccccacctcctggagatgctcattcagctgccggccaactccgtcaccaaggtctccatccagtttgaacgagccctgctcaagtggacagaatacacgccagaccccaaccatggcttctatgtcagcccatctgtcctcagtgcccttgtgcccagcatggtggcagccaaaccagtggactgggaagagagccctctcttcaacaccttgttcccggtgtctgatggctccagctactttgtccgactctacacagagcccttgctagtgaacctgcccacccccgacttcagcatgccctacaatgtgatctgccttacatgcactgtggtggccgtgtgctatggctccttctacaatctcctcacccgaaccttccacattgaagagcccaaatccggcggcctggccaagcggctggctaacctcatccggcgtgctcgtggtgttccccctctctaagattccctttcttcagcaactacagcttcatactcacctgccccaggggagcagtggcagggctttttctgccatgccctctttccccagagttagcttctgaagctaactccccctggatctggtctg

SEQ ID NO: 231 - DNA, 1397 bp, Rat
cgggccccccctcgaggtcgacggtatcgataagcttgattaattaaccctcactaaagggaacaaaagctggagctcgcgcgcctgcaggtcgacactagtggatccaaagaattcggcacgagcggcacgagcggccccgaagggggctgcacgggcgacttggcggcgatggctcgagctccggcggcgacgacggtggccggaggcggcggctcctcctccttctcctcctgggcttgggcccggcggtgatccgagctggcggccgcggccccccgatgagactgttggcgggctggctgtgcctgagcctggcgtccgtgtggctggcgcggaggatgtggacgctgcggagcccgctctcccgctctctgtacgtgaacatgactagcggccctggcgggccagcggcggccacgggcggcgggaaggacacgcaccagtggtatgtgtgcaacagagagaaattatgcgaatcacttcagtctgtctttgttcagagttatcttgaccaaggaacacagatcttcttaaacaacagcattgagaaatctggctggctatttatccaactctatcattcttttgtatcatctgtttttagcctgtttatgtctagaacatctattaacgggttgctaggaagaggctccatgtttgtgttctcaccagatcagtttcagagactgcttaaaattaatccggactggaaaacccatagacttcttgatttaggtgctggagatggagaagtcacgaaaatcatgagccctcattttgaagaaatttatgccactgaactttctgaaacaatgatctggcagctccagaagaagaaatacagagtgcttggtataaatgaatggcagaatacagggttccagtatgatgtcatcagctgcttaaatctgctggatcgctgtgatcagcctctgacattgttaaaagatatcagaagtgtcttggagcccacccaaggcagggtcatcctggccttggttttgccctttcatccctatgtggaaaacgtaggtggcaagtgggagaaaccatcagaaattctggaaatcaagggacagaattgggaagagcaagtgaatagcctgcctgaggtgttcaggaaagctggctttgtcatcgaagctttcactagactgccatacctgtgtgaaggtgacatgtacaatgactactatgttctggacgacgctgtctttgttctcagaccagtgtaaacatgtggaggcccaagtcttcagagtcacccctggaatctgccctccagaagaggaggtgcatccagtgatgtgagggggacctctggggactgtcattctcagtatcatgtaggaatttaaaaagccaaaatactaattctttctttgtagtgtgta

SEQ ID NO: 232 - DNA, 861 bp, Rat; identical to SEQ ID NO: 7

SEQ ID NO: 233 - DNA, 445 bp, Mouse
ggaagtagaagggcccggcgttttcatggcggcgtcctgggggcaggtgcttgctctggtgctggtggccgcactgtggggtggcacgcagccgctgctgaagcgagcctcctccggcctggagcaagtgcgtgagcggacgtgggcctggcagctgttgcaggagataaaggctctcttcgggaatactgaggtgcgtctagctctcacggacgagcccctgaaaatttcaccataggtcggccgtattcccagcccatctcttactcactagaagttcctggaagagtcatttatcctcttacctgatgccctttctcctcaatcagagtggatcccttctctactacttgactttggcatcaacagatctgacgttagctgtgcccatctgcaactctctggccatcgtctttacactgattgttgggaaggtccttggaga

SEQ ID NO: 234 - DNA, 565 bp, Human
cagcatcctcaatcaatccaacagcatattcggttgcatcttctacacactacagctattgttaggttgcctgcggacacgctgggcctctgtcctgatgctgctgagctccctggtgtctctcgctggttctgtctacctggcctggatcctgttcttcgtgctctatgatttctgcattgtttgtatcaccacctatgctatcaacgtgagcctgatgtggctcagtttccggaaggtccaagaaccccagggcaaggctaagaggcactgagccctcaacccaagccaggctgacctctgctttgctttggcatgtgagccttgcctaagggggcatatctgggtccctagaaggccctagatgtggggcttctagattaccccctcctcctgccatacccgcacatgacaatggaccaaatgtgccacacgctcgctcttttttacacccagtgcctctgactctgtccccatgggctggtctccaaagctctttccattgcccagggagggaaggttctgagcaataaagtttcttagatcaatcaaaaaaaaaaaaaaa

SEQ ID NO: 235 - DNA, 476 bp, Human
ggtggctttcattggtgctgtccccggcataggtccatctctgcagaagccatttcaggagtacctggaggctcaacggcagaagcttcaccacaaaagcgaaatgggcacaccacagggagaaaactggttgtcctggatgtttgaaaagttggtcgttgtcatggtgtgttacttcatcctatctatcattaactccatggcacaaagttatgccaaacgaatccagcagcggttgaactcagaggagaaaactaaataagtagagaaagttttaaactgcagaaattggagtggatgggttctgccttaaattgggaggactccaagccgggaaggaaaattcccttttccaacctgtatcaatttttacaacttttttcctgaaagcagtttagtccatactttgcactgacatactttttccttctgtgctaaggtaaggtatccaccctcgatgcaatccaccttgtttt

SEQ ID NO: 236 - DNA, 607 bp, Human
tatgtccactaacaatatgtcggacccacggaggccgaacaaagtgctgaggtacaagcccccgccgagcgaatgtaacccggccttggacgacccgacgcggactacatgaacctgctgggcatgatcttcagcatgtgcggcctcatgcttaagctgaagtggtgtgcttgggtcgctgtctactgctccttcatcagctttgccaactctcggagctcggaggacacgaagcaaatgatgagtagcttcatgctgtccatctctgccgtggtgatgtcctatctgcagaatcctcagcccatgacgcccccatggtgataccagcctagaagggtcacattttggaccctgtctatccactaggcctgggctttggctgctaaacctgctgccttcagctgccatcctggacttccctgaatgaggccgtctcggtgcccccagctggatagagggaacctggccctttcctagggaacaccctaggcttacccctcctgcctcccttcccctgcctgctgctgggggagatgctgtccatgtttctaggggtattcatttgctttctcgttgaaacctgttgttaataaagtttttcactctg

SEQ ID NO: 237 - DNA, 513 bp, Mouse
ttctccattacctctatgcctaatattcatcagccttcattactctctagcatattcaccttgattcaacagattcaaacttcctacagccttctactgatgtcttacaagctcttgcctctgtgcctttctcatgctattctttttgcttagattgctctttggtcccagctcatgttcatcactcccttcaaagcctttcttcctttatatcttctgactgagctctccctgattgacatcacctcatgcgatgacctccctcattctgtgctgcctcagcacttatcttttgagtttgtactgtggtccatgtacttactaatatgttgctttgtaattattttctagcactctgtgttacagtttcatatttgtatttatttccaaaattaaattgtaagctccttgagggcaggaataataacttttacatttgtatctctgcacccccgagtgcctagtatagtgctgagcacatagtaggcgtttaataaatgcttgttgaagtat

SEQ ID NO: 238 - DNA, 944 bp, Rat
ggcacgaggggccgccgagtcccgccgggtcggtgtagctcgctgccgacgctgcgacgctcgtgggtgccgtgttcggcttttcctgtctacttcagtgcaccgctgcagctccggcctcgggtctgacgcgccacagcatggcttccgctttggaggagttgcagaaagacctagaagaggtcaaagtgctgctggaaaagtccactaggaaaagactacgtgatactcttacaaatgaaaaatccaagattgagacggaactaaggaacaagatgcagcagaagtcacagaagaaaccagaatttgataatgaaaagccagctgctgtggttgctcctcttacaacagggtacactgtgaaaatcagtaattatggatgggatcagtcagataagtttgtgaaaatctacattactttaactggagttcatcaggttcctgctgagaatgtgcaagtacacttcacagagaggtcatttgatcttttggtaaaaaacctcaatggcaagaattactccatgattgtgaacaatcttttgaaacctatctctgtggaaagcagttcaaaaaaagtcaagactgatacagttattatcctatgtagaaagaaagcagaaaacacacgatgggactacttaactcaggtggaaaaagaatgcaaagagaaagaaaagccttcctacgacactgaggcagatcctagtgagggattaatgaatgttctaaagaaaatttatgaagatggagatgatgacatgaagcgaaccattaataaagcgtgggtggaatcccgagagaagcaagccagggaagacacagaattctgaggctttaaaagtcctgtgggaaccgtcatgtggagtgctcgtgtttccagtagggactgttggtgaactgcacacatgtgttcatgtgggtatgtagttttggacagatgacta

SEQ ID NO: 239 - DNA, 386 bp, Rat
ctcgtgccgaattcggcacgagtggcgagatggggaatgcggccctgggagcggagctgggcgtgcgggtcctgctctttgtggccttcctggcgaccgagctgctccctcccttccagcggcggattcagcccgaggagctgtggctttaccggaacccgtacgtggaggcggaatacttccccaccggccccatgtttgtcattgcctttctcaccccactgtccctgatcttcttcgccaagtttctgaggaaagctgacgccaccgacagcaagcaagcctgcctcgctgccagccttgccctagctctgaatggtgtctttaccaacatcataaaactgatagtgggcaggccacgcccagatttcttctaccgatgcttc

SEQ ID NO: 240 - DNA, 228 bp, Rat; identical to SEQ ID NO: 52

SEQ ID NO: 241 - DNA, 452 bp, Human; identical to SEQ ID NO: 31

SEQ ID NO: 242 - DNA, 1311 bp, Mouse
ctgcaacaaggctgttggttcctctccaatgggctccagtgaagggctcctgggcctgggccctgggcccaatggtcacagtcacctgctgaagaccccactgggtggccagaaacgcagtttttcccacctgctgccctcacctgagcccagcccagagggcagctacgtgggccagcactcccagggcctcggcggccactacgcggactcctacctgaagcggaagaggattttctaaggggtcgacaccagagatgctccaagggcctgcaccaagttgcttttgggttttttctggtatttgtgttttctgggattttatttttattattttttttaatgtcctttctttgggtaatagagaaatctctgcaaaagactttgctgaccaaccagctggagctcaaggaatgtggggtatctggggccacaccattacctgtgggcttgctcctggagccaaaccctgcagccttaagagagaggggcctgacctgctctctttccctccctagctccaggcctcctctcctgcctcgtcactcctgtgttctggcctcttgagtgcctttggaggtgtctctgacctgtgaggatcagagacagtccccgtttttaaacttcgacaattgacttttatttccttttctaatttttattattttttaaaacaaccaggatgattatcacatctactcccccatccgtccagaaaagccccaaattgattccttcagggtctggcctgcccaggctctattccacatgtgcaggttccaacagcttaaccctattctcttcccagtcatctgctgcaggtatagctgtctcatgcccctgcctgcctattctggccagtaccctaagccccaagatctccagcccctgccccagtatccttgccttctgatgccttaaagttgggccacaggtcctgctgggtcagagcctcacagatgcggagctccaaaagctccgctcaggaccaaagagctctggcctagggttcatcctttctccaggtgtctgccctgtggacagaaggctaaagccttgatcttggcaaaccaccccttttgcccaaagcctggatgcagagaccagtattttctgctggcttcaacagtctcccctgctgtctgtgaaaggtgaccattgtacccaggccactgggcctctaccatgttctttcaaacccaggtcattaccatccccaggctggatcactggagcaggcctcctctctgtccatgtgagggggacctaggggctctgcccttagccagctgagccaccaccagcctccct

SEQ ID NO: 243 - DNA, 399 bp, Mouse; identical to SEQ ID NO: 62

SEQ ID NO: 244 - DNA, 1421 bp, Mouse
  misc_feature (1)...(1421): n = A,T,C or G
gccgaggcgggcaggcaccagccagagcagctggcggcagacagtcggaccgagacagttggaccgagacagtcgaacggtctaacagggcctggcttgcctacctggcagctgcacccggtccttttcccagagctggttctgtgggtcaacatggtcccctgcttcctcctgtctctgctgctacttgtgaggcctgcgcctgtggtggcctactctgtgtccctcccggcctccttcctggaggaagtggcgggcagtggggaagctgagggttcttcagcctcttccccaagcctgctgccgccccggactccagccttcagtcccacaccagggaggacccagcccacagctccggtcggccctgtgccacccaccaacctcctggatgggatcgtggacttcttccgccagtatgtgatgctcattgcggtggtgggctcgctgacctttctcatcagttcatagtctgcgcggcactcatcacgcgccagaagcacaaggccacagcctactacccgtcctctttccccgaaaagaagtatgtggaccagagagaccgggctggggggccccatgccttcagcgaggtccctgacagggcacctgacagccggcaggaagagggcctggactcctcccagcagctccaggctgacattctggctgctactcagaacctccggtctccagctagagccctgccaggcagtggggagggaacaaaacaggtgaagggtgggtcggaggaggaggaggagaaggaagaggaggtgttcagtggccaggaggagccccgggaagccccagtatgtggggtcactgaagagaagccggaggtccctgacgagacagcctcagcagaggctgaaggggttcccgcagccagcgagggccaaggggaaccagaagggtctttctccttagcccaggaaccccagggagcagctggtccttccgaaaggtcctgtgcctgcaacagaatctcccctaatgtgtaacaggccccagaactgtgaggcctgactcttgggtcctcgaaggtcacctccttggtcaagaaaggcattcagctttgactgcttcttgacaccctgccttggccattgtgggtgccaatcctgaccctgaatgggcaaagctgctggcctctggtgtaccccaggaaacaccaccccaagttccagcgcccttaatgactctcacatcctgggggcttcaccccgaagcaccacttttctggaaggggaaggtcagacacatcccagtttggagccgcaatgaggcagtcctcagaacagaaggggaacaggccagaggctgactgtgacatacacagtaaacacccctgcttgcaccttggctgnggagacaagaggggctgttgatcanatggcctgcggtgtcctatctgccgt

SEQ ID NO: 245 - DNA, 461 bp, Mouse
cgcctgcaggtcgacactagtggatccaaagttctttttcttttctttttcttttttttgtgtgtgtgtgttttggtttgttgttgttttggttttcctggaactcactctgtagaccaggctagccccaaactcagaaatctgcctcccgagtgctgggactaagggtgtgcaccaccactgccctggtgcagatgactcctttaaggagctagagtaacccttgttcgcctcggtgagagtctgagaatcaggcgctttggctacacagctcaatttacacagccaagcctttagcttctatgtgtgctgggcatggacagagcctcctcatcgccagtgatgatggccgggtttccaggcagccgtggtcctgtctgaatattgtctctaactgccacagtttcagagaaaggggaacaagttctcctttgcttcttgccctcccagatagacccttg

SEQ ID NO: 246 - DNA, 1280 bp, Mouse
ttggactcgcgcgcctgcaggtcgacactagtggatccaaagaattcggcacgagagaacattcgagaatatgttcggtggatgatgtattggattgtctttgcgatcttcatggcagcagaaaccttcacagacatcttcatttcctggtccggcccaaggattggcaggccatggggttgggaagggcctcaccaccaccaccacctggcctctggctcacacaaacccctccccttgcttacacacaggttcccgttttattacgagttcaagatggcttttgtgctgtggctgctctcaccttacaccaagggggccagcctgctttaccgaaagtttgtccacccatccctatcccgccatgagaaggagatcgacgcatgtatcgtgcaggcaaaggagcgcagctatgaaaccatgctcagttttgggaagcggagcctcaacatcgctgcctcagctgctgtgcaggctgctaccaagagtcaaggcgctctagctggaaggctacggagtttctctatgcaagacctgcgctctatccctgacacccctgtccccacctaccaagatcccctctacctggaagaccaggtaccccgacgtagaccccctattggataccggccaggcggcctgcagggcagtgacacagaggatgagtgttggtcagacaatgagattgtcccccagccacctgttgggccccgagagaagcctctaggccgcagccagagccttcgggtggtcaagaggaagccattgactcgagagggcacctcacgctccctgaaggtccgaaccccgaaaaaggccatgccctcagacatggacagctagagtctgcagattgaggccaccttacctctggagccagcaggggacctttcgctgctacaccagctaccggggttctgctccgtctggcttgtgcctaaatggcacatggcgtggtaccctgcacagggagacattcactgtaccaaagcagcccaggcctggggcctatttattgccttcctctgccttttgctttctcagacatgggaccagagccccaccagtccctaccgacgaaaccaaaagtccaaccagctgtgttcattccttcttgtccttcaaaatacttgacagccttttccaaggcctggtgtgtgtgtgtgtgtgtgtgtgtgtgtgtgtgtgtgtgtgtttacgtacactagctgcatgtttcgtgttggtgagtgaggtcaggcttatgaatatttttatataaataaataccaaacagtgaa

SEQ ID NO: 247 - DNA, 833 bp, Rat
gtgccctccgccgggtcgggatggagctgcctgccgtgaacttgaaggttattctcctggttcactggctgttgacaacctggggctgcttggcgttctcaggctcctatgcttggggcaacttcactatcctggccctgggtgtgtgggctgtggcccagcgggactctgttgatgccattggcatgtttcttggtggcttggttgccaccatcttcctggacattatctacattagcatcttctactcaagcgttgccgttggggacactggccgcttcagtgccggcatggccatcttcagcttgctgctgaagcccttctcctgctgcctcgtctaccacatgcaccgggagcgagggggtgagctcccgctccgctcggatttcttcggaccttctcaggaacatagtgcctaccagacaattgactcgtcagactcacctgcagacccccttgcaagcctggagaacaagggccaagctgccccccgggggtactgaagctgtccctggccgtcctggggcccagcaggatgcttgtcaccttctttactggacctacaatggggtatcctccattccctgccacagaggtggcctgagtcatgtgccctcggaggtcccagctgagaagagcccagtcctaattctccatgctgcccctccattcaagacacctgttaacccctgggctagaactgtggttggtttcttcccctcctccccatcactataacacacaaccgccgagctgtgcagagtgttcagggccatccaggccttatgggccaatgatcactgcctctcaggctaccccaaggtgacccagcc

SEQ ID NO: 248 - DNA, 1308 bp, Rat
gccgaggcgggcaggcaccagccagagcagctggcggcagacagtcggaccgagacagttggaccgagacagtcgaacggtctaacagggcctggcttgcctacctggcagctgcacccggtccttttcccagagctggttctgtgggtcaacatggtcccctgcttcctcctgtctctgctgctacttgtgaggcctgcgcctgtggtggcctactctgtgtccctcccggcctccttcctggaggaagtggcgggcagtggggaagctgagggttcttcagcctcttccccaagcctgctgccgccccggactccagccttcagtcccacaccagggaggacccagcccacagctccggtcggccctgtgccacccaccaaccttctggatgggatcgtggacttcttccgccagtatgtgatgctcattgcggtggtgggctcgctgacctttctcatcatgttcatagtctgcgcggcactcatcacgcgccagaagcacaaggccacagcctactacccgtcctctttccccgaaaagaagtatgtggaccagagagaccgggctggggggccccatgccttcagcgaggtccctgacagggcacctgacagccggcaggaagagggcctggactcctcccagcagctccaggctgacattctggctgctactcagaacctccggtctccagctagagccctgccaggcagtggggagggaacaaaacaggtgaagggtgggtcggaggaggaggaggagaaggaagaggaggtgttcagtggccaggaggagccccgggaagccccagtatgtggggtcactgaagagaagccggaggtccctgacgagacagcctcagcagaggctgaaggggttcccgcagccagcgagggccaaggggaaccagaagggtctttctccttagcccaggaaccccagggagcagctggtccttccgaaaggtcctgtgcctgcaacagaatctcccctaatgtgtaacaggccccagaactgtgaggcctgactcttgggtcctcgaaggtcacctccttggtcaagaaaggcattcagctttgactgcttcttgacaccctgccttggccattgtgggtgccaatcctgaccctgaatgggcaaagctgctggcctctggtgtaccccaggaaacaccaccccaagttccagcgcccttaatgactctcaccatcctgggggcttcaccccgaagcaccacttctctggaaggggaaggtcagacacatcccagttggagccgcaatgaggcagtcctcagaacagaag

SEQ ID NO: 249 - DNA, 1212 bp, Human
tagcgtggtcgcggccgaggtactacagactttgtgataaggctgaagcttggggcatcgtcctagaaacggtggccacagctggggttgtgacctcggtggccttcatgctcactctcccgatcctcgtctgcaaggtgcaggactccaacaggcgaaaaatgctgcctactcagtttctcttcctcctgggtgtgttgggcatctttggcctcaccttcgccttcatcatcggactggacgggagcacagggcccacacgcttcttcctctttgggatcctcttttccatctgcttctcctgcctgctggctcatgctgtcagtctgaccaagctcgtccgggggaggaagcccctttccctgttggtgattctgggtctggccgtgggcttcagcctagtccaggatgttatcgctattgaatatattgtcctgaccatgaataggaccaacgtcaatgtcttttctgagctttccgctcctcgtcgcaatgaagactttgtcctcctgctcacctacgtcctcttcttgatggcgctgaccttcctcatgtcctccttcaccttctgtggttccttcacgggctggaagagacatggggcccacatctacctcacgatgctcctctccattgccatctgggtggcctggatcaccctgctcatgcttcctgactttgaccgcaggtgggatgacaccatcctcagctccgccttggctgccaatggctgggtgttcctgttggcttatgttagtcccgagttttggctgctcacaaagcaacgaaaccccatggattatcctgttgaggatgctttctgtaaacctcaactcgtgaagaagagctatggtgtggagaacagagcctactctcaagaggaaatcactcaaggttttgaagagacaggggacacgctctatgccccctattccacacattttcagctgcagaaccagcctccccaaaaggaattctccatcccacgggcccacgcttggccgagcccttacaaagactatgaagtaaagaaagagggcagctaactctgtcctgaagagtgggacaaatgcagccgggcggcagatctagcgggagctcaaagggatgtgggcgaaatcttgagtcttctgagaaaactgtacctgcccgggcggccgctcgaaatcaagcttatcgataccgtcgacctcgagggggggcccggtacac

SEQ ID NO: 250 - DNA, 453 bp, Human
aagaattccaaatgcttacttttctggtgcagaaagattgttgggaacagacaggaaccaatgtgggaattcaacttcaagttcaaaaaacagtcccctaggttaaagagcaagtgtacaggaggattgcagcctcccgttcagtacgaagatgttcataccaatccagaccaggactgctgcctactgcaggtcaccaccctcaatttcatctttattccgattgtcatgggaatgatatttactctgtttactatcaatgtgagcacggacatgcggcatcatcgagtgagactggtgttccaagattcccctgtccatggtggtcggaaactgcgcagtgaacagggtgtgcaagtcatcctggaccagtgcacagcgttcggctctttgactggtggcatcctcagtacccattctccctgagagcgtagttactgcttcccatccctt

SEQ ID NO: 251 - DNA, 242 bp, Human
gagagagagaactagtctcgagttttttgtatttttatttttgttcatctgctgctgtttacattctggggggttagggggagtccccctccctccctttcccccccaagcacagaggggagaggggccagggaagtggatgtctcctcccctcccaccccaccctgttgtagcccctcctaccccctccccatccaggggctgtgtattattgtgagcgaataaacagagagacgctaaca

SEQ ID NO: 252 - DNA, 358 bp, Human
gatggccccagtcccaagttggccctgtggctgccctcaccagctcccacagcagccccaacagccctgggggaggctggtcttgccgagcacagccagagggatgaccggtggctgctggtggcactcctggtgccaacgtgtgtctttttggtggtcctgcttgcactgggcatcgtgtactgcacccgctgtggcccccatgcacccaacaagcgcatcactgactgctatcgctgggtcatccatgctgggagcaagagcccaacagaacccatgccccccaggggcagcctcacaggggtgcagacctgcagaaccagcgtgtgatggggtgcagacccccctcatggagtat

SEQ ID NO: 253 - DNA, 568 bp, Human
catctgtcatggcggctgggctgtttggtttgagcgctcgccgtcttttggcggcagcggcgacgcgagggctcccggccgcccgcgtccgctgggaatctagcttctccaggactgtggtcgccccgtccgctgtggcgggaaagcggcccccagaaccgaccacaccgtggcaagaggacccagaacccgaggacgaaaacttgtatgagaagaacccagactcccatggttatgacaaggaccccgttttggacgtctggaacatgcgacttgtcttcttctttggcgtctccatcatcctggtccttggcagcacctttgtggcctatctgcctgactacaggatgaaagagtggtcccgccgcgaagctgagaggcttgtgaaataccgagaggccaatggccttcccatcatggaatccaactgcttcgaccccagcaagatccagctgccagaggatgagtgaccagttgctaagtggggctcaagaagcaccgccttccccaccccctgcctgccattctgacctcttctcagagcacctaattaaaggggctgaaagtc

SEQ ID NO: 254 - DNA, 1421 bp, Human
gattagcgtggtcgcggccgaggtgtctgttcccaggagtccttcggcggctgttgtgtcagtggcctgatcgcgatggggacaaaggcgcaagtcgagaggaaactgttgtgtctcttcatattggcgatcctgttgtgctccctggcattgggcagtgttacagtgcactcttctgaacctgaagtcagaattcctgagaataatcctgtgaagttgtcctgtgcctactcgggcttttcttctccccgtgtggagtggaagtttgaccaaggagacaccaccagactcgtttgctataataacaagatcacagcttcctatgaggaccgggtgaccttcttgccaactggtatcaccttcaagtccgtgacacgggaagacactgggacatacacttgtatggtctctgaggaaggcggcaacagctatggggaggtcaaggtcaagctcatcgtgcttgtgcctccatccaagcctacagttaacatcccctcctctgccaccattgggaaccgggcagtgctgacatgctcagaacaagatggttccccaccttctgaatacacctggttcaaagatgggatagtgatgcctacgaatcccaaaagcacccgtgccttcagcaactcttcctatgtcctgaatcccacaacaggagagctggtctttgatcccctgtcagcctctgatactggagaatacagctgtgaggcacggaatgggtatgggacacccatgacttcaaatgctgtgcgcatggaagctgtggagcggaatgtgggggtcatcgtggcagccgtccttgtaaccctgattctcctgggaatcttggtttttggcatctggtttgcctatagccgaggccactttgacagaacaaagaaagggacttcgagtaagaaggtgatttacagccagcctagtgcccgaagtgaaagagaattcaaacagacctcgtcattcctggtgtgagcctggtcggctcaccgcctatcatctgcatttgccttactcaggtgctaccggactctggcccctgatgtctgtagtttcacaggatgccttatttgtcttttacaccccacagggccccctacttcttcggatgtgtttttaataatgtcagctatgtgccccatcctccttcatgccctccctccctttcctaccactggtgagtggcctggaacttgtttaaagtgtttattccccatttctttgagggatcaggaaggaatcctgggtatgccattgacttcccttctaagtagacagcaaaaatggcgggggtcgcaggaatctacactcaactgcccacctggctggcagggatctttgaataggtatcttgagcttggttctgggctctttccttgtgtacctgcccgggcggccgctcgaaatcaagcttatcgata

SEQ ID NO: 255 - DNA, 1464 bp, Mouse
ggcacgagcgggagcctgctactgccctgctgggttccttggggccgactgtagccttgcctgtccacagggtcgcttcggccccagctgtgcccacgtgtgtacatgcgggcaaggggcggcatgtgacccagtgtcggggacttgcatctgtcctcccgggaagacgggaggccattgtgagcgcggctgtccccaggaccggtttggcaagggctgtgaacacaagtgtgcctgcaggaatgggggcctgtgtcatgctaccaatggcagctgctcctgccccctgggctggatggggccacactgtgagcacgcctgccctgctgggcgctatggtgctgcctgcctcctggagtgttcctgtcagaacaatggcagctgtgagcccacctccggcgcttgcctctgtggccctggcttctatggtcaagcttgtgaagacacctgccctgccggcttccatggatctggttgccagagagtttgcgagtgtcaacagggcgctccctgtgaccctgtcagtggccggtgcctctgccctgctggcttccgtggccagttctgcgagagggggtgcaagccaggcttttttggagatggctgcctgcagcagtgtaactgccccacgggtgtgccctgtgatcccatcagcggcctctgcctttgcccaccagggcgcgcaggaaccacatgtgacctagattgcagaagaggccgctttgggccgggctgtgccctgcgctgtgattgtgggggtggggctgactgcgaccccatcagtgggcagtgccactgtgtggacagctacacgggacccacttgccgggaagtgcccacacagctgtcctctatcagaccagcaccccagcactccagcagcaaggccatgaagcactaactcagaggaacgcccacagaggcccactactgtgttccagcccaagggacccaggcctctgctggtgactaagatagaggtggcacttttggatccacacctcttctggaaagccatggattgctgtggacagctatggatagtcatatagccacacacccgggctccatggtcatggggaagaaggcctcctttggacacaaggaatccaggaagtcggctgggcttcgggccactgtttacatggggaccctgcaggctgtgctgtggaatcctggccctcttcagcgacctgggatgggaccaaggtgggaatagacaaggccccacctgcctgccaggtccttctggtgctaggccatggactgctgcagccagccaactgtttacctggaaatgtagtccagaccatatttatataaggtatttatgggcatctccacctgccgttatggtcctgggtcagatggaagctgcctgaccccagaacttaggcagtggcctgtggggtctccagcaagtgggatcaagggttttgtaaaacccagtgagttaaaggcaca

SEQ ID NO: 256 - DNA, 2411 bp, Mouse; identical to SEQ ID NO: 75

SEQ ID NO: 257 - DNA, 3516 bp, Mouse
aaagtggagggcgagggccggggccggtgggctctggggctgctgcgcaccttcgacgccggcgaattcgcaggctgggagaaggtgggctcgggcggcttcgggcaggtgtacaaggtgcgccatgtgcactggaagacgtggctcgcgatcaagtgctcgcccagtctgcacgtcgacgacagggaacgaatggagctcctggaggaagctaagaagatggagatggccaagttccgatacattctacctgtgtacggcatatgccaggaacctgtcggcttggtcatggagtacatggagacaggctccctggagaagctgctggcctcagagccattgccttgggacctgcgctttcgcatcgtgcacgagacagccgtgggcatgaacttcctgcattgcatgtctccgccactgctgcacctagacctgaagccagcgaacatcctgctggatgcccactaccatgtcaagatttctgactttgggctggccaagtgcaatggcatgtcccactctcatgacctcagcatggatggcctgtttggtacaatcgcttacctccctccagagcgaattcgtgagaagagccgcttgtttgacaccaaacatgatgtatacagcttcgccattgtgatctggggtgtgcttacacagaagaagccatttgcagatgaaaagaacatcctacacatcatgatgaaagtggtaaagggccaccgcccagagctgccacccatctgcagaccccggccgcgtgcctgtgccagcctgatagggctcatgcaacggtgctggcatgcagacccacaggtgcggcccaccttccaagaaattacctctgaaacagaagacctttgtgagaagcctgatgaggaggtgaaagacctggctcatgagccaggcgagaaaagctctctagagtccaagagtgaggccaggcccgagtcctcacgcctcaagcgcgcctctgctccccccttcgataacgactgcagtctctccgagttgctgtcacagttggactctgggatctcccagactcttgaaggccccgaagagctcagccgaagttcctctgaatgcaagctcccatcgtccagcagtggcaagaggctctcgggggtgtcctcagtggactcagccttttcctccagaggatcgctgtcactgtcttttgagcgggaagcttcaacaggcgacctgggccccacagacatccagaagaagaagctagtggatgccatcatatcaggggacaccagcaggctgatgaagatcctacagccccaagatgtggacttggttctagacagcagtgccagcctgctgcacctggctgtggaggccggacaggaggagtgtgtcaagtggctgctgcttaacaatgccaaccccaacctgaccaacaggaagggctctacaccactgcatatggctgtggagcggaagggacgtggaattgtggagctactgctagcccggaagaccagtgtcaatgccaaggatgaagaccagtggactgccctgcactttgcagcccagaatggggatgaggccagcacaaggctgctgctagagaagaatgcttctgtcaatgaggtggactttgagggccgaacacccatgcatgtagcctgccagcatggacaggagaacattgtgcgcaccctgctccgccgtggtgtggatgtgggcctgcagggaaaggatgcctggttgcctctgcactatgctgcctggcagggccaccttcccattgttaagctgctagccaagcagcctggggtgagtgtgaatgcccagacactagacgggaggacacccctgcacctggctgctcagagggggcattaccgtgtggctcgcattctcattgacctgtgctctgatgttaacatctgcagcctacaggcacagacacctctgcatgttgctgcagagactggacacactagtactgccaggctactcttgcatcgtggtgctggcaaggaggctttgacctcagagggctatactgccttgcacctggcagcccagaatggacacctggctactgtcaagctgctcatagaggagaaggctgatgtgatggctcggggtcccctgaatcagacagcactgcacctggctgctgcccgtggacactcagaggtggtagaagagctggtcagtgctgacctcattgacctgtctgatgagcagggcctcagcgcactgcacctggctgctcagggcaggcattcacagactgtggagacactgctcaaacatggagcacacatcaacttgcagagtctcaagttccaaggaggccagagctctgctgccacgttgctccgacgcagcaagacctagcttgccaccacaaaaccagggctccgtgtaggcttctggaccatccttgtttcctcatggggacagaatggtcctgggacactgctcaccctgttggtggcctgcccatacactgaccaagcagaggctaatggacaaggcaggagtagctgtcttggggcacagtagccaaagtgtctgatgtcagatgggactaggttggtgtcatgtcactgtggtattgattggctgctgatgcaggccttttatgacaaagcctatacaagaatgtctcctctgtccatagagcaagccatttctgcttgcttggagcatgacatcttcagtagagatgtgggaagggcagtgtcctttgtcttctcattgtgatgggcagagtagctgtctctgaaggcatagtgggttcttaatatatgagtgacatggtagctttgcttgagacctgtgaggatctggctgctggagtctagaaagggagtgattataaagccacagggttggtcctaacactggacagccttgccaacatgaaactgctgtttcatttggtattttggttttggtttttagttttgatgtctaggtcaccatgcctcgttcccccgatttccctgctgagttctcagctaaaatgtcagagccatatatataaaagttaccggaaatttttttgtaaatgggttttatactaaaagttgtttagtcaaacagtttgctctttcaggctctcttggtgaagtgatggtttgggccaagggctttgctgacttgccctttagcaacttctgctatgttccagttacagtagatgaatgtgggcagaggtggccattggagattgttgtactctgaggagtcagattcgatagccttttgttgtaccttccccatttctgttctgaacactgtcactgtagagatgacctgtgtgcaaacatgctatagcatggtatgtgacacagaatgatattaatgtactgtgtactttgacatgaatcatggacaggatactctttcatgacaggaagtagtggagctggctatgttttaatatgcctcaatttgtcttcactgcttccctctcttgtgtaaaacacggggaccataggagatctgttttatgtcaataaaggactccgcctaaaaaaaaaa

SEQ ID NO: 258 - DNA, 946 bp, Mouse
cctggctgcaaatcctgcactgtgtgtcgtcatggcctgtgtcgctccgtggagaaggacagcgtagtgtgtgagtgccacccgggatggaccggtccgctatgtgatcaggaagctcgggacccctgccttggtcacagctgcaggcacgggacatgcatggcgactggggactcctacgtgtgcaagtgtgccgagggctacggaggggctttgtgtgaccagaagaatgactctgccagtgcctgctcagccttcaagtgccaccatgggcagtgtcacatctcagatcgaggggagccctattgcctatgccagcctggcttcagtggccatcactgtgagcaagagaatccatgtatgggggagatagtccgtgaagccatccgccgccagaaagactacgcctcttgtgccacggcgtccaaggtgcccatcatggaatgccgcgggggctgcgggaccacgtgctgccagccgattcgaagcaagcggcggaaatatgtcttccagtgcacggacggctcctcattcgtggaagaggtggagagacacttggaatgtggctgccgcgcgtgttcctgagccccctctgccacccacccatcctccgcctttcggaccccagctcattgggctgggaacagccacatggaacctctttgagattcagaacgaaggagagaaatctggagagcaagaggcaaaagagagaatattaagtatattgtaaaataaccaaaaatagaacttatttttattatggaaagtgactattttcatcttttattatataaatatatcacaccgtctgagtatatggactatacagtgagttatttttaccaagttttgttttgtgttgtgtatttgttgtgtttttataaacagctgtttataaaattttaagacaaagaaaaaacactaataaaaatgttttaaacac

SEQ ID NO: 259 - DNA, 1018 bp, Human
gctaccgctactgccagcaccgctgcgtgaacctgcctggctccttccgctgccagtgcgagccgggcttccagctggggcctaacaaccgctcctgtgttgatgtgaacgagtgtgacatgggggccccatgcgagcagcgctgcttcaactcctatgggaccttcctgtgtcgctgccaccagggctatgagctgcatcgggatggcttctcctgcagtgatattgatgagtgtagctactccagctacctctgtcagtaccgctgcgtcaacgagccaggccgtttctcctgccactgcccacagggttaccagctgctggccacacgcctctgccaagacattgatgagtgtgagtctggtgcgcaccagtgctccgaggcccaaacctgtgtcaacttccatgggggctaccgctgcgtggacaccaaccgctgcgtggagccctacatccaggtctctgagaaccgctgtctctgcccggcctccaaccctctatgtcgagagcagccttcatccattgtgcaccgctacatgaccatcacctcggagcggagcgtgcccgctgacgtgttccagatccaggcgacctccgtctaccccggtgcctacaatgcctttcagatccgtgctggaaactcgcagggggacttttacattaggcaaatcaacaacgtcagcgccatgctggtcctcgcccggccggtgacgggcccccgggagtacgtgctggacctggagatggtcaccatgaattccctcatgagctaccgggccagctctgtactgaggctcaccgtctttgtaggggcctacaccttctgaggagcaggagggagccaccctccctgcagctaccctagctgaggagcctgttgtgaggggcagaatgagaaaggcccaggggcccccattgacaggagctgggagctctgcaccacgagcttcagtcaccccgagaggagaggaggtaacgaggagggcggactccaggccccggcccagagatttggact

SEQ ID NO: 260 - DNA, 2800 bp, Mouse
ggcacgaggaagagccgtgcaataatgggtctgaaatccttgcttataacatcgatctgggagacagctgcattactgtgggcaacactaccacacacgtgatgaagaacctccttccagaaacgacataccggatcagaattcaggctatcaatgaaattggagttggaccatttagtcagttcattaaagcaaaaactcggccattaccgccttcgcctcctaggcttgagtgtgctgcgtctggtcctcagagcctgaagctcaagtggggagacagtaactccaagacacatgctgctggtgacatggtgtacacactacagctggaagacaggaacaagaggtttatctcaatctaccgaggacccagccacacctacaaggtccagagactgacagagtttacctgctactccttcaggatccaggcaatgagcgaggcaggggaggggccttactcagaaacctacaccttcagcacaaccaaaagcgtgcctcccaccctcaaagcacctcgagtgacgcagttagaagggaattcctgtgaaatcttctgggagacggtaccaccgatgagaggcgaccctgtgagctacgttctacaggtgctggttggaagagactctgagtacaagcaggtgtacaagggagaagaagccacattccaaatctcaggcctccagagcaacacagattacaggttccgcgtgtgtgcctgccgccgctgtgtggacacgtctcaggagctcagtggcgcgttcagcccctctgcggctttcatgttacaacagcgtgaggttatgcttacaggggacctgggaggcatggaagaggccaagatgaagggcatgatgcccaccgacgaacagtttgctgcactcatcgtgcttggcttcgcgaccctgtccattttgtttgcctttatattacagtacttcttaatgaagtaaatccagcaggccagtggtatgctcggaacgccacacgttttaatacacatttactcagagcctcccctttttacgctgtttcgttctttgatttatacgcttctcttgttttacacatttagctaggggaaagagtttggctgcacctatttgagatgcaaaactaggaagaggttaaactggatttttttttaaacaataataaataaaggaataaagaagagaaggaagcggcgggcaagctccagacaccgagagccagtgtgcccaacgagcttgccttgtcgggcttccccgtgtgcttctggtctgttcccactgatgtctttcgcaagcctttgatcatcttgtgtgttacagttcagtaatttatattcacagtcatttcttgatcatctatacctgttaacagaatcacagtgtatgtagttcagggctgggattccggtgttgtcagagtattgccacatgagaatattcagtgtgccttcggaggaggccacctcgaccatccttacgtcactcagttacgtaactgtgttagctcatctaagtcaaagtgtgtactttaatctaaaatgttttattactctgtatcccttatgattttaacactatgagttgcctgtctaagaagtcacataaccaaatgcgcctataaatgatagagcattgtagattttcacatcggtccatagcagtaactttaagagggcattgtgcaatagttagttgtttcttgttcggctactttaaaagctgctttaacttgtctgtctgtctttgtacataactacttctaatataatcactagagttattatattctgttatgtttgaccggaattatgtgacgagagctcatggcagttgtgaactgtctccttacatgttggcccatcatatttgaaagacttgcctttggctattctttggggtgtcagtgacgtgaatgaagttgaataccatatttcagtgcccatgatactaatgtagcagtagatagaaatcttactgataaagcccaccacaagggaaccatttacatttgtcctgtttctgggggcttcatctggccgcatggagagagggagtggaaactggctgtgagcatgagatgtttgggggccaaagagcctactagattctctccctgggtctgtcactaatttgctttgtgacctctctgtgcctgttttcccatgcatgagtaatcaaatcaaatggggattcaatacctgtaagtgctaagagaccttggatccaccggtgctatgtaagtgcggagaatcactctcacggattcacttagagtcatgaggtaatgagttctaacccaaagtcattggatccctcaaccaagtccacaatgttcaagtacctcagggacacttaagaagttggaggtgcaactgtattccaaaagggtgcgacagacacagccgattcccctcttcctgtttttttgtatatttttgctccttggtttttcttgatcatagctactttgtgcttggtctatgttgtctatgatgcagtaagtaccctgtactagcttatactattcccataccaaagtcatggggaaaccaacattattttgttttgggtttatttatactctattctgcatacagtactttaaatgccaatgacagtgcaatctttatttattgtaatgttaaatgtacttattactaatgtgccctcctagcatgttatattttgtgtgttttatactttttgtaattttaggtcagtttagttccttggcaacatctgtagtattagccttctgacatctttcttgtgtttttaaagataagagcatctaactcattaaatgc

SEQ ID NO: 261 - DNA, 1335 bp, Mouse
acccaaacagcccgggaccatgctgtcgctccgctccttgcttccacacctgggactgttcctgtgcctggctctgcacttatccccctccctctctgccagtgataatgggtcctgcgtggtccttgataacatctacacctccgacatcttggaaatcagcactatggctaacgtctctggtggggatgtaacctatacagtgacggtccccgtgaacgattcagtcagtgccgtgatcctgaaagcagtgaaggaggacgacagcccagtgggcacctggagtggaacatatgagaagtgcaacgacagcagtgtctactataacttgacatcccaaagccagtcggtcttccagacaaactggacagttcctacttccgaggatgtgactaaagtcaacctgcaggtcctcatcgtcgtcaatcgcacagcctcaaagtcatccgtgaaaatggaacaagtacaaccctcagcctcaacccctattcctgagagttctgagaccagccagaccataaacacgactccaactgtgaacacagccaagactacagccaaggacacagccaacaccacagccgtgaccacagccaataccacagccaataccacagccgtgaccacagccaagaccacagccaaaagcctggccatccgcactctcggcagccccctggcaggtgccctccatatcctgcttgtttttctcattagtaaactcctcttctaaagaaaactggggaagcagatctccaacctccaggtcatcctcccgagctcatttcaggccagtgcttaaacatacccgaatgaaggttttatgtcctcagtccgcagctccaccaccttggaccacagacctgcaacactagtgcacttgagggatacaaatgcttgcctggatctttcagggcacaaattccgcttcttgtaaatacttagtccatccatcctgcgtgtaacctgaagttctgactctcagtttaacctgttgacagccaatctgaacttgtgtttcttgccaaaggtattcccatgagcctcctgggtgtgggggtggggagggaatgatccttctttactttcaaactgatttcagatttctggccaaacctactcaggttgcaaaggacttatgtgacttatgtgactgtaggaaaaagagaaatgagtgatcatcctgtggctactagcagatttccactgtgcccagaccagtcggtaggttttgaaggaagtatatgaaaactgtgcctcagaagccaatgacaggacacatgactttttttttctaagtcaaataaacaatatattgaacaaggaaaaaaaaaa

SEQ ID NO: 262 - DNA, 1816 bp, Mouse
ggcacgaggacttctgctagtacttgctcctggcggtggctgagcaaccggtctcaccagcatgctctgcctgtgcctgtatgtgcccatcgccggggcggctcagactgagttccagtactttgagtccaaggggcttcctgccgagctgaaatccatcttcaaactcagtgtctttatcccctctcaagagttctccacataccgccaatggaagcagaaaattgtgcaagcaggtgacaaggaccttgatgggcaactggactttgaagagtttgtacattacctccaagatcatgagaaaaaactgaggctggtgttcaagagtctggacaaaaagaatgatggtcgaatcgatgctcaggagatcatgcagtccctgcgggacctgggtgtcaagatctcggaacagcaggcggagaagattcttaagagcatggataagaatggcacgatgaccatcgactggaacgagtggagggactaccacctcctgcaccctgtggagaacatcccggagatcatcctgtactggaagcactcgacgatcttcgatgtcggtgagaatctgacagtcccagatgagttcacagtggaggagaggcagacggggatgtggtggaggcacctggtggcaggaggtggggcaggggcagtttccagaacctgcactgcccccctggacagactgaaggtgctcatgcaggtccatgcctcccgcagcaacaacatgtgcatcgtaggtggattcacacagatgattcgagaagggggagccaagtcactctggcggggcaacggcatcaatgtcctcaaaattgcccctgagtcggccatcaaattcatggcatatgagcagatgaaacggcttgtcggtagtgatcaggagacgctgaggatccacgaaaggcttgtggcaggctccttggccggagccattgcccagagtagcatctacccaatggaggttctgaagacccgaatggccctgcggaaaacaggacagtactccggcatgctggactgtgccaggaggatcttggctaaagagggtgtagctgccttctacaaaggctacatccccaacatgctggggatcatcccctatgctggcatcgacctagctgtctatgagacattgaaaaatacctggctccagcgctacgcagtaaacagtgcagaccccggtgtgttcgtgctcctggcctgtggtactatctccagtacttgtggccagctggccagctacccactagccctggtcaggacccggatgcaggcacaagcctccattgagggcgcacctgaggtaaccatgagcagcctcttcaaacagattctgcggactgagggggcctttgggctctaccgggggctggcccccaacttcatgaaggtgatcccggctgtgagcatcagctacgtggtctacgaaaacctgaagatcaccctgggcgtgcagtctcggtgacgggagggtggtggacttggtgagcctgggctgcggcccagggtatgcagccacctcattctgtgaatgtgccaacactaagctgacttacccaagctgtgaaacccaggataccataggggacgggcagggagctggcaagctctgggctggttctgctgacctggcagaccttcgtgtctcttccaaggaagacctgtggatgttccttggggttcaggggtcagtaagatgtaggctcctgcactagagacaggacgttttcctcagtgcctgccagatagcgagcttggatgccagcttagttcttccatctcgttcactcagccggacctcagccacggg

SEQ ID NO: 263 - DNA, 764 bp, Mouse
gcagcacccagcgccaagcgcaccaggcaccgcgacagacggcaggagcacccatcgacgggcgtactggagcgagccgagcagagcagagagaggcgtgcttgaaaccgagaaccaagccgggcggcatcccccggccgccgcacgcacaggccggcgccctccttgcctccctgctccccaccgcgcccctccggccagcatgaggctcctggcggccgcgctgctcctgctgctcctggcgctgtgcgcctcgcgcgtggacgggtccaagtgtaagtgttcccggaaggggcccaagatccgctacagcgacgtgaagaagctggaaatgaagccaaagtacccacactgcgaggagaagatggttatcgtcaccaccaagagcatgtccaggtaccggggccaggagcactgcctgcaccctaagctgcagagcaccaaacgcttcatcaagtggtacaatgcctggaacgagaagcgcagggtctacgaagaatagggtggacgatcatggaaagaaaaactccaggccagttgagagacttcagcagaggactttgcagattaaaataaaagccctttctttctcacaagcataagacaaattatatattgctatgaagctcttcttaccagggtcagtttttacattttatagctgtgtgtgaaaggcttccagatgtgagatccagctcgcctgcgcaccagacttcattacaagtggctttttgctgggcggttggcggggggcggggggacct

SEQ ID NO: 264 - DNA, 1697 bp, Mouse
gcgcggcccgggggactcacattccccggtcccccctccgccccacgcggctgggccatggacgccagatggtgggcagtagtggtactcgccacactcccttccttgggagcaggtggagagtcacccgaagcccctccgcagtcctggacacagctgtggctcttccgcttcttgttgaatgtagcgggctatgccagctttatggtacctggctacctcctggtgcagtacttaagacggaagaactacctggagacaggcaggggtctctgcttccccctggtgaaagcctgtgtgtttggcaatgagcccaaggctcctgatgaggttctcctggctccgcggacagagacagcggaatccaccccgtcttggcaggtcctgaagctggtcttctgtgcctcgggtctccaggtgtcctatctgacttggggcatactgcaggaaagagtgatgactggcagctacggggccacagccacatcaccaggagagcatttcacagactcccagtttctggtgctgatgaaccgtgtgctggcgctggttgtggcaggcctctactgtgtcctgcgcaagcagccccgtcatggtgcacccatgtaccggtactcctttgccagtctgtcaaatgtgcttagcagctggtgccagtatgaagcacttaagttcgtcagcttccctacccaggtgctggcgaaggcctccaaggtgatccctgtcatgatgatgggaaagctggtgtcccggcgcagctatgaacactgggaatacctgactgccggcctcatctccattggagtgagcatgtttcttctatccagtggaccagagcctagaagctctccagccaccacactctctggcttggtcctactggcaggctatattgctttcgacagcttcacctcaaattggcaggatgccctgtttgcctataagatgtcatcggtgcagatgatgtttggggtcaatttattctcctgtcttttcacagtaggctcactactggaacagggggccctactggagggggcacgcttcatggggcggcacagtgagtttgcgctccatgctctcctcctctccatctgctccgcctttgggcagctcttcatcttctacaccattggacaatttggagctgctgtcttcactatcatcatgactctacgccaggctattgccatcctcctctcctgcctcctctatggccatactgtcactgtggtggggggactgggagtagctgtggtcttcactgccctcctactcagagtctatgcccggggccggaagcagcggggaaagaaggctgtgcccactgagcccccagtacagaaggtgtgagcagtgcagtaaagaccctcatcttctgaggcactggctcagtatcagcatacagcagaggattggagccctggaggcagcctcttttgccttaaaagcccccacttcatggaaatgacagctgtgggtgtttggttagaggtgacccagagctcctcccccaatctctgaaatcttgctggtggccaagcaaaccagcaccagggctttgctcatagcacgcacccttgaggctaccaggcaccagctgggaagagaatttacaggtcctgcagttcccctaggggccagtgagaatggtgctgtgccagaagggacaaaggcccccagcccagttggggccc

SEQ ID NO: 265 - DNA, 159 bp, Mouse
gttttcttctccaggctgaagacctgaacgtcaagttggaaggggagccttccatgcggaaaccaaagcagcggccgcggccggagcccctcatcatccccaccaaggcgggcactttcatcgcccctcctgtctactccaacatcaccccttaccaga

SEQ ID NO: 266 - DNA, 292 bp, Mouse; identical to SEQ ID NO: 112

SEQ ID NO: 267 - DNA, 339 bp, Mouse; identical to SEQ ID NO: 93

SEQ ID NO: 268 - DNA, 153 bp, Mouse
ctgaagttctctcatccttgtctggaagaccataatagttactgcattaatggagcatgtgcattccaccatgagctgaagcaagccatttgcagatgctttactggttatacgggacaacgatgtgagcatttgaccctaacttcgtatgct

SEQ ID NO: 269 - DNA, 153 bp, Human
ttgaagttctcacacctttgcctggaagatcataacagttactgcatcaacggtgcttgtgcattccaccatgagctagagaaagccatctgcaggtgttttactggttatactggagaaaggtgtgagcacttgactttaacttcatatgct

SEQ ID NO: 270 - DNA, 288 bp, Human
gcggccgcgctgctcctgctgctgctggcgctgtacaccgcgcgtgtggacgggtccaaatgcaagtgctcccggaagggacccaagatccgctacagcgacgtgaagaagctggaaatgaagccaaagtacccgcactgcgaggagaagatggttatcatcaccaccaagagcgtgtccaggtaccgaggtcaggagcactgcctgcaccccaagctgcagagcaccaagcgcttcatcaagtggtacaacgcctggaacgagaagcgcagggtctacgaagaatag

SEQ ID NO: 271 - DNA, 234 bp, Mouse
tccaagtgtaagtgttcccggaaggggcccaagatccgctacagcgacgtgaagaagctggaaatgaagccaaagtacccacactgcgaggagaagatggttatcgtcaccaccaagagcatgtccaggtaccggggccaggagcactgcctgcaccctaagctgcagagcaccaaacgcttcatcaagtggtacaatgcctggaacgagaagcgcagggtctacgaagaatag

SEQ ID NO: 272 - DNA, 234 bp, Human
tccaaatgcaagtgctcccggaagggacccaagatccgctacagcgacgtgaagaagctggaaatgaagccaaagtacccgcactgcgaggagaagatggttatcatcaccaccaagagcgtgtccaggtaccgaggtcaggagcactgcctgcaccccaagctgcagagcaccaagcgcttcatcaagtggtacaacgcctggaacgagaagcgcagggtctacgaagaatag

SEQ ID NO: 273 - DNA, 645 bp, Mouse
atgctgtcgctccgctccttgcttccacacctgggactgttcctgtgcctggctctgcacttatccccctccctctctgccagtgataatgggtcctgcgtggtccttgataacatctacacctccgacatcttggaaatcagcactatggctaacgtctctggtggggatgtaacctatacagtgacggtccccgtgaacgattcagtcagtgccgtgatcctgaaagcagtgaaggaggacgacagcccagtgggcacctggagtggaacatatgagaagtgcaacgacagcagtgtctactataacttgacatcccaaagccagtcggtcttccagacaaactggacagttcctacttccgaggatgtgactaaagtcaacctgcaggtcctcatcgtcgtcaatcgcacagcctcaaagtcatccgtgaaaatggaacaagtacaaccctcagcctcaacccctattcctgagagttctgagaccagccagaccataaacacgactccaactgtgaacacagccaagactacagccaaggacacagccaacaccacagccgtgaccacagccaataccacagccaataccacagccgtgaccacagccaagaccacagccaaaagcctggccatccgcact

SEQ ID NO: 274 - DNA, 63 bp, Mouse
gggtacagtgatggttaccaagtgtgtagtaggttcggaagcaaagtgcctcagtttctgaac

SEQ ID NO: 275 - protein, 388 aa, Mouse
MGLEPSWYLLLCLAVSGAAGTDPPTAPTTAERQRQPTDIILDCFLVTEDRHRGAFASSGDRERALLVLKQVPVLDDGSLEGITDFQGSTETKQDSPVIFEASVDLVQIPQAEALLHADCSGKAVTCEISKYFLQARQEATFEKAHWFISNMQVSRGGPSVSMVMKTLRDAEVGAVRHPTLNLPLSAQGTVKTQVEFQVTSETQTLNHLLGSSVSLHCSFSMAPDLDLTGVEWRLQHKGSGQLVYSWKTGQGQAKRKGATLEPEELLRAGNASLTLPNLTLKDEGTYICQISTSLYQAQQIMPLNILAPPKVQLHLANKDPLPSLVCSIAGYYPLDVGVTWIREELGGIPAQVSGASFSSLRQSTMGTYSISSTVMADPGPTGATYTCQ

SEQ ID NO: 276 - protein, 151 aa, Rat
MAEPWAGQFLQALPATVLGALGTLGSEFLREWETQDMRVTLFKLLLLWLVLSLLGIQLAWGFYGNTVTGLYHRPGKWQQMKLSKLTENKGRQQEKGLQRYRWVCWLLCCTLLLSRPLRQLQRAWVGGLEYHDAPRVSLHCPQPCLQQRQVL

SEQ ID NO: 277 - protein, 163 aa, Rat; identical to SEQ ID NO: 143

SEQ ID NO: 278 - protein, 330 aa, Rat; identical to SEQ ID NO: 144

SEQ ID NO: 279 - protein, 61 aa, Rat; identical to SEQ ID NO: 146

SEQ ID NO: 280 - protein, 105 aa, Rat; identical to SEQ ID NO: 147

SEQ ID NO: 281 - protein, 27 aa, Mouse
MLKASLHILFLGILNVPIVDTSTKTGV

SEQ ID NO: 282 - protein, 169 aa, Mouse; identical to SEQ ID NO: 154

SEQ ID NO: 283 - protein, 61 aa, Mouse; identical to SEQ ID NO: 155

SEQ ID NO: 284 - protein, 131 aa, Mouse; identical to SEQ ID NO: 156

SEQ ID NO: 285 - protein, 78 aa, Mouse; identical to SEQ ID NO: 158

SEQ ID NO: 286 - protein, 206 aa, Mouse; identical to SEQ ID NO: 159

SEQ ID NO: 287 - protein, 169 aa, Mouse; identical to SEQ ID NO: 154

SEQ ID NO: 288 - protein, 114 aa, Mouse; identical to SEQ ID NO: 161

SEQ ID NO: 289 - protein, 46 aa, Mouse; identical to SEQ ID NO: 162

SEQ ID NO: 290 - protein, 199 aa, Mouse
MVLPTVLILLLSWAAGLGGETRPRAATERRSVGPSARRGAGPRVSGLLGFCQLSQLASADPERRSPRAIVPRAPRPRSRRRPCLPGFSRRFPRERRSPGQPPSRTPQPPQPCRGPSPGTAQTRSNLRGWQRGGSIVLQASERTRAGCRTPVCVSHPSAFPPPRALFGVFVASAPEVVCVCVSVVLSVCLLSPRGKTLVD

SEQ ID NO: 291 - protein, 568 aa, Rat
MELLYWCLLCLLLPLTSRTQKLPTRDEELFQMQIRDKALFHDSSVIPDGAEISSYLFRDTPRRYFFMVEEDNTPLSVTVTPCDAPLEWKLSLQELPEESSADGSGDPEPLDQQKQQMTDVEGTELFSYKGNDVEYFLSSSSPSGLYQLELLSTEKDTHFKVYATTTPESDQPYPDLPYDPRVDVTSIGRTTVTLAWKQSPTASMLKQPIEYCVVINKEHNFKSLCAAETKMSADDAFMVAPKPGLDFSPFDFAHFGFPTDNLGKDRSFLAKPSPKVGRHVYWRPKVDIKKICIGSKNIFTVSDLKPNTQYYFDVFMVNTNTNMNTAFVGAFARTKEEAKQKTVELKDGRVTDVVVKRKGKKFLRFAPVSSHQKVTLFIHSCMDTVQVQVRRDGKLLLSQNVEGIRQFQLRGKPKGKYLIRLKGNKKGASMLKILATTRPSKHAFPSLPDDTRIKAFDKLRTCSSVTVAWLGTQERRKFCIYRKEVGGNYSEEQKRRERNQCLGPDTRKKSEKVLCKYFHSQNLQKAVTTETIRDLQPGKSYLLDVYVVGHGGHSVKYQSKLVKTRKVC

SEQ ID NO: 292 - protein, 123 aa, Mouse
MLTEPAQLFVHKKNQPPSHSSLRLHFRTLAGALALSSTQMSWGLQILPCLSLILLLWNQVPGLEGQEFRFGSCQVTGVVLPELWEAFWTVKNTVQTQDDITSIRLLKPQVLRNVSVIRWEGDS

SEQ ID NO: 293 - protein, 66 aa, Mouse
MDVWSGLPLETLWIYEAVLPWLLMGQGHAWVCGPIALWVFVNVPGLCYHQKPFRCPWSGLLPEALC

SEQ ID NO: 294 - protein, 294 aa, Rat
MTVFRKVTTMISWMLLACALPCAADPMLGAFARRDFQKGGPQLVCSLPGPQGPPGPPGAPGSSGMVGRMGFPGKDGQDGQDGDRGDSGEEGPPGRTGNRGKQGPKGKAGAIGRAGPRGPKGVSGTPGKHGIPGKKGPKGKKGEPGLPGPCSCGSSRAKSAFSVAVTKSYPRERLPIKFDKILMNEGGHYNASSGKFVCSVPGIYYFTYDITLANKHLAIGLVHNGQYRIRTFDANTGNHDVASGSTILALKEGDEVWLQIFYSEQNGLFYDPYWTDSLFTGFLIYADQGDPNEV

SEQ ID NO: 295 - protein, 243 aa, Rat
MRPLLALLLLGLASGSPPLDDNKIPSLCPGQPGLPGTPGHHGSQGLPGRDGRDGRDGAPGAPGEKGEGGRPGLPGPRGEPGPRGEAGPVGAIGPAGECSVPPRSAFSAKRSESRVPPPADTPLPFDRVLLNEQGHYDATTGKFTCQVPGVYYFAVHATVYRASLQFDLVKNGQSIASFFQFFGGWPKPASLSGGAMVRLEPEDQVWVQVGVGDYIGIYASIKTDSTFSGFLVYSDWHSSPVFA

SEQ ID NO: 296 - protein, 444 aa, Rat
MLVAFLGASAVTASTGLLWKKAHAESPPSVNSKKTDAGDKGKSKDTREVSSHEGSAADTAAEPYPEEKKKKRSGFRDRKVMEYENRIRAYSTPDKIFRYFATLKVINEPGETEVFMTPQDFVRSITPNEKQPEHLGLDQYIIKRFDGKKIAQEREKFADEGSIFYTLGECGLISFSDYIFLTTVLSTPQRNFEIAFKMFDLNGDGEVDMEEFEQVQSIIRSQTSMGMRHRDRPTTGNTLKSGLCSALTTYFFGADLKGKLTIKNFLEFQRKLQHDVLKLEFERHDPVDGRISERQFGGMLLAYSGVQSKKLTAMQRQLKKHFKDGKGLTFQEVENFFTFLKNINDVDTALSFYHMAGASLDKVTMQQVARTVAKVELSDHVCDVVFALFDCDGNGELSNKEFVSIMKQRLMRGLEKPKDMGFTRLMQAMWKCAQETAWDFALPK

SEQ ID NO: 297 - protein, 65 aa, Human
MTMLHLAVIFLFSALSRALVQCSSHRARVVLSWADYLRRVAPTALATALDVGLSNWSFLYVTVSL

SEQ ID NO: 298 - protein, 52 aa, Human
MKINIIQGSIMILLICLSQTCTSLPVQEALITFCHLYFTYCYSGNSNKMQVL

SEQ ID NO: 299 - protein, 41 aa, Human
MPCVLFFFFFLSTSKSMIYSSLMLGLYIPSEACVLGLKFKF

SEQ ID NO: 300 - protein, 80 aa, Mouse
MVWGTLLGRVLAALLNIVPTESSYRSPSFLAGFRFCCSPWSQHFGCGRLTSCLPPCVDRVVKTYSSPPCLSVNGHDVTIC

SEQ ID NO: 301 - protein, 82 aa, Mouse
MGSVLTSCFCVGGSAEAWNWLPSASSLFPCCIATLLPLLFLLPHLHSTLSRVQRLNFNIGHLGVYLYVNNDIRSRVTPLLSS

SEQ ID NO: 302 - protein, 411 aa, Rat
MPTMWPLLHVLWLALVCGSVHTTLSKSDAKKAASKTLLEKTQFSDKPVQDRGLVVTDIKAEDVVLEHRSYCSARARERNFAGEVLGYVTPWNSHGYDVAKVFGSKFTQISPVWLQLKRRGREMFEITGLHDVDQGWMRAVKKHAKGVRIVPRLLFEDWTYDDFRSVLDSEDEIEELSKTVVQVAKNQHFDGFVVEVWSQLLSQKHVGLIHMLTHLAEALHQARLLVILVIPPAVTPGTDQLGMFTHKEFEQLAPILDGFSLMTYDYSTSQQPGPNAPLSWIRACVQVLDPKSQWRSKILLGLNFYGMDYAASKDAREPVIGARAVLKVALPLAVSSQQIWTLGRGGSTSALLLAGLGLASEPCTKSEEVPKKSLLDTVWHWQGEPGALCRGRLHTWILVSAVPQACTCLFQ

SEQ ID NO: 303 - protein, 617 aa, Mouse
MGSPRLAALLLSLPLLLIGLAVSARVACPCLRSWTSHCLLAYRVDKRFAGLQWGWFPLLVRKSKSPPKFEDYWRHRTPASFQRKLLGSPSLSEESHRISIPSSAISHRGQRTKRAQPSAAEGREHLPEAGSQKCGGPEFSFDLLPEVQAVRVTIPAGPKASVRLCYQWALECEDLSSPFDTQKIVSGGHTVDLPYEFLLPCMCIEASYLQEDTVRRKKCPFQSWPEAYGSDFWQSIRFTDYSQHNQMVMALTLRCPLKLEASLCWRQDPLTPCETLPNATAQESEGWYILENVDLHPQLCFKFSFENSSHVECPHQSGSLPSWTVSMDTQAQQLTLHFSSRTYATFSAAWSDPGLGPDTPMPPVYSISQTQGSVPVTLDLIIPFLRQENCILVWRSDVHFAWKHVLCPDDAPYPTQLLLRSLGSGRTRPVLLLHAADSEAQRRLVGALAELLRTALGGGRDVIVDLWEGTHVARIGPLPWLWAARERVAREQGTVLLLWNCAGPSTACSGDPQAASLRTLLCAAPRPLLLAYFSRLCAKGDIPRPLRALPRYRLLRDLPRLLRALDAQPATLASSWSHLGAKRCLKNRLEQCHLLELEAAKDDYQGSTNSPCGFSCL

SEQ ID NO: 304 - protein, 72 aa, Mouse; identical to SEQ ID NO: 153

SEQ ID NO: 305 - protein, 649 aa, Mouse
MISPAWSLFLIGTKIGLFFQVAPLSVVAKSCPSVCRCDAGFIYCNDRSLTSIPVGIPEDATTLYLQNNQINNVGIPSDLKNLLKVQRIYLYHNSLDEFPTNLPKYVKELHLQENNIRTITYDSLSKIPYLEELHLDDNSVSAVSIEEGAFRDSNYLRLLFLSRNHLSTIPGGLPRTIEELRLDDNRISTISSPSLHGLTSLKRLVLDGNLLNNHGLGDKVFFNLVNLTELSLVRNSLTAAPVNLPGTSLRKLYLQDNHINRVPPNAFSYLRQLYRLDMSNNNLSNLPQGIFDDLDNITQLILRNNPWYCGCKMKWVRDWLQSLPVKVNVRGLMCQAPEKVRGMAIKDLSAELFDCKDSGIVSTIQITTAIPNTAYPAQGQWPAPVTKQPDIKNPKLIKDQRTTGSPSRKTILITVKSVTPDTIHISWRLALPMTALRLSWLKLGHSPAFGSITETIVTGERSEYLVTALEPESPYRVCMVPMETSNLYLFDETPVCIETQTAPLRMYNPTTTLNREQEKEPYKNPNLPLAAIIGGAVALVSIALLALVCWYVHRNGSLFSRNCAYSKGRRRKDDYAEAGTKKDNSILEIRETSFQMLPISNEPISKEEFVIHTIFPPNGMNLYKNNLSESSSNRSYRDSGIPDSDHSHS

SEQ ID NO: 306 - protein, 150 aa, Rat
MAAPMDRTHGGRAARALRRALALASLAGLLLSGLAGALPTLGPGWRRQNPEPPASRTRSLLLDAASGQLRLEYGFHPDAVAWANLTNAIRETGWAYLDLGTNGSYKWIPRAAGLCSWCGGGLCVRGAHLHALDEHGGQLLRPLRVRSRLL

SEQ ID NO: 307 - protein, 580 aa, Rat
MAAAMPLGLSLLLLVLVGQGCCGRVEGPRDSLREELVITPLPSGDVAATFQFRTRWDSDLQREGVSHYRLFPKALGQLISKYSLRELHLSFTQGFWRTRYWGPPFLQAPSGAELWVWFQDTVTDVDKSWKELSNVLSGIFCASLNFIDSTNTVTPTASFKPLGLANDTDHYFLRYAVLPREVVCTENLTPWKKLLPCSSKAGLSVLLKADRLFHTSYHSQAVHIRPICRNAHCTSISWELRQTLSVVFDAFITGQGKKDWSLFRMFSRTLTEACPLASQSLVYVDITGYSQDNETLEVSPPPTSTYQDVILGTRKTYAVYDLFDTAMINNSRNLNIQLKWKRPPDNEALPVPFLHAQRYVSGYGLQKGELSTLLYNSHPYRAFPVLLLDAVPWYLRLYVHTLTITSKGKDNKPSYIHYQPAQDRQQPHLLEMLIQLPANSVTKVSIQFERALLKWTEYTPDPNHGFYVSPSVLSALVPSMVAAKPVDWEESPLFNTLFPVSDGSSYFVRLYTEPLLVNLPTPDFSMPYNVICLTCTVVAVCYGSFYNLLTRTFHIEEPKSGGLAKRLANLIRRARGVPPL

SEQ ID NO: 308 - protein, 283 aa, Rat
MTSGPGGPAAATGGGKDTHQWYVCNREKLCESLQSVFVQSYLDQGTQIFLNNSIEKSGWLFIQLYHSFVSSVFSLFMSRTSINGLLGRGSMFVFSPDQFQRLLKINPDWKTHRLLDLGAGDGEVTKIMSPHFEEIYATELSETMIWQLQKKKYRVLGINEWQNTGFQYDVISCLNLLDRCDQPLTLLKDIRSVLEPTQGRVILALVLPFHPYVENVGGKWEKPSEILEIKGQNWEEQVNSLPEVFRKAGFVIEAFTRLPYLCEGDMYNDYYVLDDAVFVLRPV

SEQ ID NO: 309 - protein, 37 aa, Rat; identical to SEQ ID NO: 126

SEQ ID NO: 310 - protein, 70 aa, Mouse
MAASWGQVLALVLVAALWGGTQPLLKRASSGLEQVRERTWAWQLLQEIKALFGNTEVRLALTDEPLKISP

SEQ ID NO: 311 - protein, 58 aa, Human
MLLSSLVSLAGSVYLAWILFFVLYDFCIVCITTYAINVSLMWLSFRKVQEPQGKAKRH

SEQ ID NO: 312 - protein, 52 aa, Human
MGTPQGENWLSWMFEKLVVVMVCYFILSIINSMAQSYAKRIQQRLNSEEKTK

SEQ ID NO: 313 - protein, 70 aa, Human
MNLLGMIFSMCGLMLKLKWCAWVAVYCSFISFANSRSSEDTKQMMSSFMLSISAVVMSYLQNPQPMTPPW

SEQ ID NO: 314 - protein, 58 aa, Mouse
MFITPFKAFLPLYLLTELSLIDITSCDDLPHSVLPQHLSFEFVLWSMYLLICCFVIIF

SEQ ID NO: 315 - protein, 229 aa, Rat
MASALEELQKDLEEVKVLLEKSTRKRLRDTLTNEKSKIETELRNKMQQKSQKKPEFDNEKPAAVVAPLTTGYTVKISNYGWDQSDKFVKIYITLTGVHQVPAENVQVHFTERSFDLLVKNLNGKNYSMIVNNLLKPISVESSSKKVKTDTVIILCRKKAENTRWDYLTQVEKECKEKEKPSYDTEADPSEGLMNVLKKIYEDGDDDMKRTINKAWVESREKQAREDTEF

SEQ ID NO: 316 - protein, 128 aa, Rat
RAEFGTSGEMGNAALGAELGVRVLLFVAFLATELLPPFQRRIQPEELWLYRNPYVEAEYFPTGPMFVIAFLTPLSLIFFAKFLRKADATDSKQACLAASLALALNGVFTNIIKLIVGRPRPDFFYRCF

SEQ ID NO: 317 - protein, 75 aa, Rat; identical to SEQ ID NO: 171

SEQ ID NO: 318 - protein, 43 aa, Human; identical to SEQ ID NO: 175

SEQ ID NO: 319 - protein, 86 aa, Mouse; identical to SEQ ID NO: 152

SEQ ID NO: 320 - protein, 60 aa, Mouse; identical to SEQ ID NO: 181

SEQ ID NO: 321 - protein, 160 aa, Mouse
IRHEAEAGRHQPEQLAADSRTETVGPRQSNGLTGPGLPTWQLHPVLFPELVLWVNMVPCFLLSLLLLVRPAPVVAYSVSLPASFLEEVAGSGEAEGSSASSPSLLPPRTPAFSPTPGRTQPTAPVGPVPPTNLLDGIVDFFRQYVMLIAVVGSLTFLISS

SEQ ID NO: 322 - protein, 54 aa, Mouse
RLQVDTSGSKVLFLFFFFFLCVCVLVCCCFGFPGTHSVDQASPKLRNLPPECWD

SEQ ID NO: 323 - protein, 280 aa, Mouse
LDSRACRSTLVDPKNSARENIREYVRWMMYWIVFAIFMAAETFTDIFISWSGPRIGRPWGWEGPHHHHHLASGSHKPLPLLTHRFPFYYEFKMAFVLWLLSPYTKGASLLYRKFVHPSLSRHEKEIDACIVQAKERSYETMLSFGKRSLNIAASAAVQAATKSQGALAGRLRSFSMQDLRSIPDTPVPTYQDPLYLEDQVPRRRPPIGYRPGGLQGSDTEDECWSDNEIVPQPPVGPREKPLGRSQSLRVVKRKPLTREGTSRSLKVRTPKKAMPSDMDS

SEQ ID NO: 324 - protein, 166 aa, Rat
ALRRVGMELPAVNLKVILLVHWLLTTWGCLAFSGSYAWGNFTILALGVWAVAQRDSVDAIGMFLGGLVATIFLDIIYISIFYSSVAVGDTGRFSAGMAIFSLLLKPFSCCLVYHMHRERGGELPLRSDFFGPSQEHSAYQTIDSSDSPADPLASLENKGQAAPRGY

SEQ ID NO: 325 - protein, 338 aa, Rat
IRHEAEAGRHQPEQLAADSRTETVGPRQSNGLTGPGLPTWQLHPVLFPELVLWVNMVPCFLLSLLLLVRPAPVVAYSVSLPASFLEEVAGSGEAEGSSASSPSLLPPRTPAFSPTPGRTQPTAPVGPVPPTNLLDGIVDFFRQYVMLIAVVGSLTFLIMFIVCAALITRQKHKATAYYPSSFPEKKYVDQRDRAGGPHAFSEVPDRAPDSRQEEGLDSSQQLQADILAATQNLRSPARALPGSGEGTKQVKGGSEEEEEKEEEVFSGQEEPREAPVCGVTEEKPEVPDETASAEAEGVPAASEGQGEPEGSFSLAQEPQGAAGPSERSCACNRISPNV

SEQ ID NO: 326 - protein, 347 aa, Human
AWSRPRYYRLCDKAEAWGIVLETVATAGVVTSVAFMLTLPILVCKVQDSNRRKMLPTQFLFLLGVLGIFGLTFAFIIGLDGSTGPTRFFLFGILFSICFSCLLAHAVSLTKLVRGRKPLSLLVILGLAVGFSLVQDVIAIEYIVLTMNRTNVNVFSELSAPRRNEDFVLLLTYVLFLMALTFLMSSFTFCGSFTGWKRHGAHIYLTMLLSIAIWVAWITLLMLPDFDRRWDDTILSSALAANGWVFLLAYVSPEFWLLTKQRNPMDYPVEDAFCKPQLVKKSYGVENRAYSQEEITQGFEETGDTLYAPYSTHFQLQNQPPQKEFSIPRAHAWPSPYKDYEVKKEGS

SEQ ID NO: 327 - protein, 141 aa, Human
KNSKCLLFWCRKIVGNRQEPMWEFNFKFKKQSPRLKSKCTGGLQPPVQYEDVHTNPDQDCCLLQVTTLNFIFIPIVMGMIFTLFTINVSTDMRHHRVRLVFQDSPVHGGRKLRSEQGVQVILDQCTAFGSLTGGILSTHSP

SEQ ID NO: 328 - protein, 71 aa, Human
RERTSLEFFVFLFLFICCCLHSGGLGGVPLPPFPPQAQRGEGPGKWMSPPLPPHPVVAPPTPSPSRGCVLL

SEQ ID NO: 329 - protein, 109 aa, Human
DGPSPKLALWLPSPAPTAAPTALGEAGLAEHSQRDDRWLLVALLVPTCVFLVVLLALGIVYCTRCGPHAPNKRITDCYRWVIHAGSKSPTEPMPPRGSLTGVQTCRTSV

SEQ ID NO: 330 - protein, 155 aa, Human
SVMAAGLFGLSARRLLAAAATRGLPAARVRWESSFSRTVVAPSAVAGKRPPEPTTPWQEDPEPEDENLYEKNPDSHGYDKDPVLDVWNMRLVFFFGVSIILVLGSTFVAYLPDYRMKEWSRREAERLVKYREANGLPIMESNCFDPSKIQLPEDE

SEQ ID NO: 331 - protein, 299 aa, Human; identical to SEQ ID NO: 189

SEQ ID NO: 332 - protein, 299 aa, Mouse; identical to SEQ ID NO: 192

SEQ ID NO: 333 - protein, 109 aa, Mouse; identical to SEQ ID NO: 194

SEQ ID NO: 334 - protein, 787 aa, Mouse
KVEGEGRGRWALGLLRTFDAGEFAGWEKVGSGGFGQVYKVRHVHWKTWLAIKCSPSLHVDDRERMELLEEAKKMEMAKFRYILPVYGICQEPVGLVMEYMETGSLEKLLASEPLPWDLRFRIVHETAVGMNFLHCMSPPLLHLDLKPANILLDAHYHVKISDFGLAKCNGMSHSHDLSMDGLFGTIAYLPPERIREKSRLFDTKHDVYSFAIVIWGVLTQKKPFADEKNILHIMMKVVKGHRPELPPICRPRPRACASLIGLMQRCWHADPQVRPTFQEITSETEDLCEKPDEEVKDLAHEPGEKSSLESKSEARPESSRLKRASAPPFDNDCSLSELLSQLDSGISQTLEGPEELSRSSSECKLPSSSSGKRLSGVSSVDSAFSSRGSLSLSFEREASTGDLGPTDIQKKKLVDAIISGDTSRLMKILQPQDVDLVLDSSASLLHLAVEAGQEECVKWLLLNNANPNLTNRKGSTPLHMAVERKGRGIVELLLARKTSVNAKDEDQWTALHFAAQNGDEASTRLLLEKNASVNEVDFEGRTPMHVACQHGQENIVRTLLRRGVDVGLQGKDAWLPLHYAAWQGHLPIVKLLAKQPGVSVNAQTLDGRTPLHLAAQRGHYRVARILIDLCSDVNICSLQAQTPLHVAAETGHTSTARLLLHRGAGKEALTSEGYTALHLAAQNGHLATVKLLIEEKADVMARGPLNQTALHLAAARGHSEVVEELVSADLIDLSDEQGLSALHLAAQGRHSQTVETLLKHGAHINLQSLKFQGGQSSAATLLRRSKT

SEQ ID NO: 335 - protein, 194 aa, Mouse
PGCKSCTVCRHGLCRSVEKDSVVCECHPGWTGPLCDQEARDPCLGHSCRHGTCMATGDSYVCKCAEGYGGALCDQKNDSASACSAFKCHHGQCHISDRGEPYCLCQPGFSGHHCEQENPCMGEIVREAIRRQKDYASCATASKVPIMECRGGCGTTCCQPIRSKRRKYVFQCTDGSSFVEEVERHLECGCRACS

SEQ ID NO: 336 - protein, 274 aa, Human
YRYCQHRCVNLPGSFRCQCEPGFQLGPNNRSCVDVNECDMGAPCEQRCFNSYGTFLCRCHQGYELHRDGFSCSDIDECSYSSYLCQYRCVNEPGRFSCHCPQGYQLLATRLCQDIDECESGAHQCSEAQTCVNFHGGYRCVDTNRCVEPYIQVSENRCLCPASNPLCREQPSSIVHRYMTITSERSVPADVFQIQATSVYPGAYNAFQIRAGNSQGDFYIRQINNVSAMLVLARPVTGPREYVLDLEMVTMNSLMSYRASSVLRLTVFVGAYTF

SEQ ID NO: 337 - protein, 316 aa, Mouse
HEEEPCNNGSEILAYNIDLGDSCITVGNTTTHVMKNLLPETTYRIRIQAINEIGVGPFSQFIKAKTRPLPPSPPRLECAASGPQSLKLKWGDSNSKTHAAGDMVYTLQLEDRNKRFISIYRGPSHTYKVQRLTEFTCYSFRIQAMSEAGEGPYSETYTFSTTKSVPPTLKAPRVTQLEGNSCEIFWETVPPMRGDPVSYVLQVLVGRDSEYKQVYKGEEATFQISGLQSNTDYRFRVCACRRCVDTSQELSGAFSPSAAFMLQQREVMLTGDLGGMEEAKMKGMMPTDEQFAALIVLGFATLSILFAFILQYFLMK

SEQ ID NO: 338 - protein, 237 aa, Mouse; identical to SEQ ID NO: 195

SEQ ID NO: 339 - protein, 469 aa, Mouse
MLCLCLYVPIAGAAQTEFQYFESKGLPAELKSIFKLSVFIPSQEFSTYRQWKQKIVQAGDKDLDGQLDFEEFVHYLQDHEKKLRLVFKSLDKKNDGRIDAQEIMQSLRDLGVKISEQQAEKILKSMDKNGTMTIDWNEWRDYHLLHPVENIPEIILYWKHSTIFDVGENLTVPDEFTVEERQTGMWWRHLVAGGGAGAVSRTCTAPLDRLKVLMQVHASRSNNMCIVGGFTQMIREGGAKSLWRGNGINVLKIAPESAIKFMAYEQMKRLVGSDQETLRIHERLVAGSLAGAIAQSSIYPMEVLKTRMALRKTGQYSGMLDCARRILAKEGVAAFYKGYIPNMLGIIPYAGIDLAVYETLKNTWLQRYAVNSADPGVFVLLACGTISSTCGQLASYPLALVRTRMQAQASIEGAPEVTMSSLFKQILRTEGAFGLYRGLAPNFMKVIPAVSISYVVYENLKITLGVQSR

SEQ ID NO: 340 - protein, 99 aa, Mouse
MRLLAAALLLLLLALCASRVDGSKCKCSRKGPKIRYSDVKKLEMKPKYPHCEEKMVIVTTKSMSRYRGQEHCLHPKLQSTKRFIKWYNAWNEKRRVYEE

SEQ ID NO: 341 - protein, 431 aa, Mouse
MDARWWAVVVLATLPSLGAGGESPEAPPQSWTQLWLFRFLLNVAGYASFMVPGYLLVQYLRRKNYLETGRGLCFPLVKACVFGNEPKAPDEVLLAPRTETAESTPSWQVLKLVFCASGLQVSYLTWGILQERVMTGSYGATATSPGEHFTDSQFLVLMNRVLALVVAGLYCVLRKQPRHGAPMYRYSFASLSNVLSSWCQYEALKFVSFPTQVLAKASKVIPVMMMGKLVSRRSYEHWEYLTAGLISIGVSMFLLSSGPEPRSSPATTLSGLVLLAGYIAFDSFTSNWQDALFAYKMSSVQMMFGVNLFSCLFTVGSLLEQGALLEGARFMGRHSEFALHALLLSICSAFGQLFIFYTIGQFGAAVFTIIMTLRQAIAILLSCLLYGHTVTVVGGLGVAVVFTALLLRVYARGRKQRGKKAVPTEPPVQKV

SEQ ID NO: 342 - protein, 51 aa, Mouse
LKFSHPCLEDHNSYCINGACAFHHELKQAICRCFTGYTGQRCEHLTLTSYA

SEQ ID NO: 343 - protein, 51 aa, Human
LKFSHLCLEDHNSYCINGACAFHHELEKAICRCFTGYTGERCEHLTLTSYA

SEQ ID NO: 344 - protein, 95 aa, Human
AAALLLLLLALYTARVDGSKCKCSRKGPKIRYSDVKKLEMKPKYPHCEEKMVIITTKSVSRYRGQEHCLHPKLQSTKRFIKWYNAWNEKRRVYEE

SEQ ID NO: 345 - protein, 77 aa, Mouse
SKCKCSRKGPKIRYSDVKKLEMKPKYPHCEEKMVIVTTKSMSRYRGQEHCLHPKLQSTKRFIKWYNAWNEKRRVYEE

SEQ ID NO: 346 - protein, 77 aa, Human
SKCKCSRKGPKIRYSDVKKLEMKPKYPHCEEKMVIITTKSVSRYRGQEHCLHPKLQSTKRFIKWYNAWNEKRRVYEE

SEQ ID NO: 347 - protein, 215 aa, Mouse
MLSLRSLLPHLGLFLCLALHLSPSLSASDNGSCVVLDNIYTSDILEISTMANVSGGDVTYTVTVPVNDSVSAVILKAVKEDDSPVGTWSGTYEKCNDSSVYYNLTSQSQSVFQTNWTVPTSEDVTKVNLQVLIVVNRTASKSSVKMEQVQPSASTPIPESSETSQTINTTPTVNTAKTTAKDTANTTAVTTANTTANTTAVTTAKTTAKSLAIRT

SEQ ID NO: 348 - protein, 21 aa, Mouse
GYSDGYQVCSRFGSKVPQFLN

SEQ ID NO: 349 - DNA, 417 bp, Mouse
gctagccgtgcacccagctctccggagcgcgtgcaggcgagccgagcgccccgtccgcggttctcgggcaggcgctgcgggctccccggctccccgccgtcccgggcacccgggcgggccatgcgcccgggctagagcgtagccgccggcatgccgctcccgctgctgctcgccgcgctctgcctcgccgcctccccggcgcccgcgcgcgcctgccagctgccgtcggagtggagacccttgagcgaaggctgccgcgccgagctagccgagaccatcgtgtatgccaaggtgctggcgctgcaccccgaggtgcctggcctctacaactacctgccgtggcagtaccaagctggagagggagggctcttctactccgccgaggtggagatgcttgtgtgaccaaggcgtggggca

SEQ ID NO: 350 - DNA, 1837 bp, Mouse
cccccacctgcccagccaagccgagtgccgccggctttgttcgctttgtcctcgcgcacctaagcggccggcctggaagaacgccatcccggagagcgcacgcggcgtcgcaccaggtctaacaacatgcctccacttctgcttctaccagccatctacatgctcctgttcttcagagtgtccccgaccatctctcttcaggaagtgcatgtgaaccgggagaccatggggaagatcgctgtggccagcaaattaatgtggtgctcagccgcggtcgacatcctgtttctgttagatggctctcacagcatcgggaaggggagcttcgagaggtccaagcgcttcgccatcgctgcctgtgatgccctggacatcagccctggcagggtcagagtcggagccttgcagtttggttccactcctcatctggaattccccttggactccttctcaactcgacaggaagtgaaggaaagcatcaaggggatagttttcaaaggtgggcgcaccgagacgggcctagccctgaaacgcctgagcagagggttccccggaggcagaaatggctctgtgccccagattcttatcatcgtcacggatggcaagtcccaggggcccgtggctctcccggctaagcagctgagagaaaggggcatcgtcgtgtttgccgtaggagtccgttttcccaggtgggacgagctgctcacgctggccagtgagccgaaggaccggcatgtgctgttggctgagcaagtggaggatgccaccaatggcctcctcagcaccctcagcagctccgcactctgcaccactgctgatccagactgcagggtggaacctcatccctgtgagcggaggacgctggagaccgtcagggagctcgctggcaatgccttgtgctggagaggatcaaggcaagcagacactgtgctggctctgccctgtcccttctacagctggaagagagtgttccagacacaccctgccaactgctacagaaccatctgtccaggcccctgtgactcccagccctgccaaaatggaggcacgtgcattccagaaggtgtggataggtaccactgtctctgcccactggcattcggaggggaagtcaactgtgccccgaagctgagcctggaatgcagaatcgatgtcctcttcctgctggacagttctgcaggcaccacattggggggcttccggagggccaaggcctttgtcaagcgctttgtgcaggccgtgctgagggaggactcccgagcccgcgttgggatagccagttatggcaggaatctaatggtggcggtgccctgtcggggagtaccagcattgtgccggacctgatcaggagccttgacagcattcccttcagcggtggcccgaccctaaccgggagtgccttgctccaggtggcagagcacggctttgggagtgccagcaggactggtcaggacaggccacgcagagtagtagttctgctcactgaatcacgctcccaggatgaggtgtctgggccagcagctcacgcaagggctcgggagctactcctcctgggcgtgggcagtgagatcctgcaggcggagctggtgaagatcaccggtagcccgaagcatgtgatggtccacacagaccctcaggacctgtcagccaaatccagagctgcagaggaggctatgcagccagccacggccaggctgccaggcacagtcactggacctggtcttcctgtggatgcctctgctctgtgggacgtgagaactttgcccaaatgcagagcttcatcaggaaatgcaccctccggtttgatgtgaatcctgatgtgacacaagttggcctg

SEQ ID NO: 351 - DNA, 941 bp, Mouse
taagccctcaggccctcctaatgctatccccctttgttcctgcagcgtggacccagtcagcagccaggccatggagctctctgatgtcaccctcattgagggtgtgggtaacgaggtgatggtggtagcaggcgtggtggcgctgactctagccctggtcctagcctggctctccacctatgtagcagacagtggtaacaaccagctgctgggcaccattgtgtcagcaggtgacacgtctgttctccacctgggccatgtggaccagctggtaaaccaaggcactccagagccaaccgaacacccccatccatcagggggcaatgatgacaaggctgaagagaccagtgacagtgggggagacgccactggagaacctggagctaggggagagatggagcccagcctggagcatctcctggacatccaaggcctgcctaaaaggcaagcaggcctggggagcagtcgcccagaagccccgctggggttagatgatggctcctgcctctctcccagccccagcctcatcaatgttcgcctcaagttcctcaatgacacggaggagctagctgtggccaggccagaggacactgtgggtaccctaaaaaggtgagtaggccggagagaggccagttgctcgtgacttgttcctcagatgatggtttcctgaagaagctgtgcatatatgtgagcacaggagggattttaaggggaaatggagacttccatagacagaccttcagtgtctttcatgtccaggccttgatctctctagccttattctttatccagtctttcctttcatccttgtagcaaatacttccctggacaagagaaccaaatgaagttgatctaccagggtcggctgctgcaggacccagcacgcacactgagttccctgaacattaccaacaactgcgtgatccactgccaccgctcac

SEQ ID NO: 352 - DNA, 571 bp, Mouse
gctgactgtacctataattcaccatgaattacgtctgtgagttacctccgtgagctctcattgtgatttgagtatgtgtgcatgtggttggggctcagctgctgtgcgcctgacatccacatttggatgtcttttggttccgtgaacaagtagaaattgcatgtgtctaccggtgacagtgtggtgtcactgggccctgtgggtggctcacttacctctgattccgtctgtgggaaagtcccagtgtacccaaatgtggcattgttgcatgccttgggtgtgtgtgggagattgtctctgtctctcagaccctttgtggctttgtctgttgaaagagacagagaccccttgtggttttctcagctgagaaccctccctcctgggatgttgggtgtaaacttaactgctttgcaaagcctgcccctcctcatgctgacccttcaatatctggcagtgcattgttcccaagccccccttgtctatgggaatgtcagggctctctcaccttgacagctgataattccattcctcgactcttgagaactggcccttgctttgttttctctgcctg

SEQ ID NO: 353 - DNA, 467 bp, Rat
cggagaatgagcgggtggccgtggctgcagctgctgcggcggcactgacaggacacgagctctatgcctttccggctgcttatcccgctcggcctcgtgtgcgtgctgctgcccctgcaccatggtgcgccaggccccgaaggcaccgcgcccgaccccgcccactacagggagcgagtcaaggccatgttctaccacgcctacgacagttacctggaaaatgcctttccctacgatgagctgagacctctcacctgtgacgggcacgacacctggggcagtttttctctgacactgattgatgccctggacaccttgctgattttggggaatacctctgaattccaaagagtggtggaggttctccaggacaaacgtggactttgatatcgacgtcaatgcctctgtgttcgaaaccaacatccgagtggtaggaggactcctttctgctcatctcttgtcaaaga

SEQ ID NO: 354 - DNA, 528 bp, Rat
gtgactcctgctgtaggaccctccaggaagcactggcctctcctacagagtcctccacctagcaccggccttaatgctaaagccaaatgtggtttctgccctgcagcgtgcccctggtaatctcgagttgccactcccaagccagcccccactggccatatggcatcatatctgggggtcaggagggcctgtgcaggctttggacagccacttgccacagcagaggagagagtgaggtttccaggagcagcaggaaggaagaccccagaattccccagggctctttgagtggtaatgttgacttctggagagtctgcccaccttgtgctcacacaagcatggacaggacactgggacttttatcctgttgttaagctgtttccacagaagcccgttcaggtagttacttcacccacattggccctatagccagaggagtgccctggctaactgcagtgtgagcttgtaagcaacagaagtgcccaggagctgaccccaaaggccaggaaggctcgagcttgccacttt

SEQ ID NO: 355 - DNA, 473 bp, Mouse
ggcagcaggaccgcggtcactgagcctctgcaggtgtcaacaaggctcaaggagcaggatggatctcgatgtggttaacatgtttgtgattgcgggtgggaccctggccattccaatcctggcatttgttgcgtctttcctcctgtggccttcagcactgataagaatctattattggtactggcggaggacactgggcatgcaagttcgctacgcacaccatgaggactatcagttctgttactccttccggggcaggccaggacacaagccatccatccttatgctccatggattctccgcacacaaggacatgtggctcagcgtggtcaagttccttccgaagaacctgcacttggtctgtgtggacatgcctgggcatgaaggcaccacccgctcctccctggatgacctgtccatagtggggcaagttaaaaggatacatcagtttgtagaatgccttaagctgaaca

SEQ ID NO: 356 - DNA, 431 bp, Rat
cttaactagcgcccccatccaccatgtttcctgacggattctagccttgtttgtttttttcaacctaaaaccaaatggaaatggccggagagctccagggcacctaggttccctggcttcggcttcggctgggctaacgcgcgagtgtggtgggactatcctaggaggtgttcctggagagagaggcgatggcgtcaagtagtaactggctgtccggagtgaatgtcgttcttgtgatggcgtacgggagcctggtattcgtattgctgtttatttttgtgaagagacaaatcatgcgctttgcaatgaaatctagaaggggacctcatgtccctgtgggacacaatgccccgaaggacttaaaagaggaaattgatattcggctatccagagttcaggacatcaagtatgaaccgcagctccttgcagat

SEQ ID NO: 357 - DNA, 1206 bp, Mouse
ccaacactcgccatgcgttctggggcactgtggccgctgctttggggagccctggtctggacagtgggatccgtgggcgccgtgatgggctccgaggattctgtgcccggtggcgtgtgctggctccagcagggcagagaggccacctgcagtctggtgctgaagactcgtgtcagccgggaggagtgctgtgcttccggcaacatcaacaccgcctggtccaacttcacccacccaggcaataaaatcagcctgctagggttcctgggcctcgtccactgcctcccctgcaaagattcctgcgacggagtggagtgcggccccggcaaggcgtgccgcatgctgggggggcgtccaacactgcgaagttgcgtgcccaactgcgaggggyttcccgcgggcttccaggtctgcggctctgatggcgccacctaccgggacgaatgcgaactgcgcaccgcgcgctgtcgcggacacccagacttgcgcgtcatgtaccgcggccgctgtcaaaagtcttgcgctcaggtagtgtgcccgcgtccccagtcgtgccttgtggatcagaccggcagcgcacactgcgtggtgtgtcgcgctgcgccctgcccagtaccttccaaccccggccaagaactctgtggcaacaacaacgttacctacatctcgtcgtgtcacctgcgccaggccacttgcttcctgggccgctccattggggttcggcacccaggcatctgcacaggtggccccaaagtaccagcagaggaggaagagaacttcgtgtgagctgcagccactgggcctggcatttgacgccatcccgattttatttattgttatagaaaatattctaatttatgtcacatggacatttcccaaacctggcctggaaccacttggggatccccctgggatcctgagcacgtatcacaaggactgaagggagatttttataatagttggtatgtgccatcacccargtactgggatcaaagttagaacccaagacccctgctgcccagggatggcagctgcatggagatccccctgctatgatctccccacctgctttctaggctggagctgtcgcagggcacagccgatgagttggtgtttgcatatggctggcctcagaccagagcgggcaacatcaggtcagagaaacactgggctcattcctgtttggtccactcagggtgaaacctg

SEQ ID NO: 358 - DNA, 1052 bp, Rat
ccagaaagaacgatttagatgacagtttttagaaaggtgaccaccatgatctcctggatgctcttggcctgtgcccttccgtgtgctgctgacccaatgcttggtgcctttgctcgcagggacttccagaagggtggtcctcaactggtgtgcagtctgcctggtccccaaggccacctggccctccaggagcaccaggatcctcaggaatggtgggaagaatgggttttcctggtaaggatggccaagacggccaggacggagaccgaggggacagtggagaagaaggtccacctggcaggacaggcaaccgaggaaaacaaggaccaaagggcaaagctggggccattgggagagcgggtcctcgaggacccaagggggtcagtggtacccccgggaaacatggtataccgggcaagaagggacctaagggcaagaaaggggaacctgggctcccaggcccctgtagctgcggcagtagccgagccaagtcggccttttcggtggcggtaaccaagagttacccacgtgagcgactgcccatcaagtttgacaagattctgatgaatgagggaggccactacaatgcatccagtggcaagttcgtctgcagcgtgccagggatctattactttacctatgacattacgctggccaacaaacacctggccatcggcctagtgcacaatggccagtaccgcattcggacttttgacgccaacaccggcaaccacgacgtggcctcgggctccaccatcctagctctcaaggagggtgatgaagtctggttacagattttctactcggagcagaatggactcttctacgacccttattggaccgacagcctgttcaccggcttcctcatctacgctgatcaaggagaccccaatgaggtatagacaagctggggttgagcgtccaggcagggactaagattccgcaagggtgctgatagaagaggatctctgaactgaggctggggactggcagttcttgggagcttttattcccaggcaagcctcctctggtgctgctttaaaaaaaaaaaa

SEQ ID NO: 359 - DNA, 1134 bp, Rat
  misc_feature (1)...(1134): n = A,T,C or G
aattcggcacgaggcggtcagaacccgggcttctcgtttgtcctgaacggcactaccagggcggtggaagcagagatggcggagggcggtgggaggagaggcgtctagtcttgctggctcagcaagcccgataagcatgaagctgctgtgtttggtggctgtggtggggtgcttgctggtacccccggctcaagccaacaagagctctgaagatatccggtgcaaatgcatctgtcccccttacagaaacatcagcgggcacatttacaaccagaatgtgtctcagaaggactgcaactgcctgcatgtggtggagcccatgccggtgcctggccatgatgtggaagcctactgcctgctctgtgagtgtaggtatgaggagcgcagcaccacaaccatcaaggtcattatcgtcatctacctgtctgtggtaggggccctcttactctacatggccttcctgatgctggtggaccctctcatccgaaagccggatgcctatactgagcagctgcacaatgaagaagagaatgaggatgcccgctccatggctgccgccgccgcatccattggaggaccccgagcaaacaccgtcctggagcgggtggaaggcgctcagcagcgatggaagctacaggtgcaggagcagcggaagacggtcttcgatcgacacaagatgctcagttagatgattgccatggcagtgtcagggacccagacctcggctaccagcttctggggcagtcttccctgggtcttcccttcaaatgcccgtggcatttgtccttctccctctctctagaaatgtactcgactgttataactagggagtgggattgggtctttggtctctagtgtctctgtaggtctctggggtagaagggagggaaaggaaggcagaagagaacagagatggttgagacggccacacgattggtgaaattcctccctcctgtcctcgccgttcctcacagctccacatcttaaggatgtttatagctctttgggagacggagctgtgccgtcaatagctcggtgggtgcgacgaaagtgtgacccagccctcagcctgtgctctacgatgccgtggcccccattcccacttttncagtgccaatactttagcttggcctg

SEQ ID NO: 360 - DNA, 876 bp, Mouse
tgccagctgccccttcgagtgcttatcatcagcaacaacaagttaggagccctgcctccagacatcagcaccttgggaagcctgcggcagcttgatgtgagcagcaatgagctgcagtccctgcccgtggagctgtgtagcctccgttccctgcgggatctcaatgttcgaaggaaccagctcagtaccctgcctgatgagctgggagaccttcctctggtccgcctggatttctcctgtaaccgcatctcccgaatccccgtctccttctgccgcctcaggcacctgcaggtcgttctgctggatagcaaccccctacagagtccacctgcccagatatgcctgaaggggaaacttcacatcttcaagtacctaacaatggaagctggccggaggggagccgccctcggggacctggtcccttcccgccccccaagttttagtccttgccctgccgaagatttatttccgggacgtcgttatgatggtggcctggactcaggcttccacagcgttgacagtggcagcaagaggtggtcaggaaatgagtccacagatgatttttcagagctgtctttccggatctcggagctggctcgtgatccccgggggcctagacaacctagggaagatggcgctggcgatggagacctggagcagattgactttattgacagccacgttcctggggaagatgaagatcgaagtgcagctgaggagcagctgccttctgaattaagccttgtagcaggggatgtggagaagccatctagcagcaggcgagaggagcctgcaggggaggagaggcggcgcccagacactttgcagttgtggcaggaacgggagcggaagcaacagcaacagagtgggggatgg

SEQ ID NO: 361 - DNA, 495 bp, Mouse
gtcgcgccagctgagagcccctaggtttgaccctcgtgcgggattccacgcggagggcaaggacagaggcccctctgttccccagggcctgctgaaggcagcgagaagcagcggccaactcaacttggcgggaaggaacctcggggaagtccctcagtgtgtttggagaataaatgtggacattcctgaagaggctaatcagaatctttcattcagttctactgaacgatggtgggatcagacagatctgaccaaactcatcatctccagcaataaacttcagtctctctctgatgacctccgactcttgcctgcccttactgttcttgatatacatgataatcagctgacatctcttccttcagctataagagagctagacaatcttcagaaacttaatgtcagccataacaaactgaaaatactgcctgaagaaattacaagcttaaaaaacctgaggacgctgcacctccagcacaatgagctgacttgcat

SEQ ID NO: 362 - DNA, 349 bp, Mouse
tctctgtctatcttgcctgctgtgagggtatcacccaggcccacttatccatctacagcgagtagtatggcggccttccttgtaacaggctttttcttttctctcttcgtggtgcttgggatggaacccagggctttgtttaggcctgacaaggctctgcccctgagctgtgccaagcccacctccctctgtgtacaaagctcctttcttgggtgaccaacatcttcctgtctttgagcaaccaaggccagatgcgagccacccagaagttaattaaaccaggttcatcgggagtttgctgaaatgttaagcatactctgttctagagagggagtgaagaaaggggcca

SEQ ID NO: 363 - DNA, 380 bp, Mouse
gagtatgaagccagagtcttagagaagtcactgagaaaagaatccagaaacaaagagaccgacaaggtgaagctgacctggagggaccgattcccagcctatttcaccaatcttgtctccatcatcttcatgatcgcagtgacatttgcaatcgtcctcggagttatcatctatagaatctccacagctgcagccttggccatgaactcctccccgtctgtgcggtccaacatccgggttacagtcacggccaccgctgttatcatcaacctcgtggtcatcattctgctggatgaagtttacggctgcattgccaggtggctcaccaagattggtgagtgccatgtgcaggacagcataggcagcatgggcctagggca

SEQ ID NO: 364 - DNA, 351 bp, Mouse
gcggcagagaacgagatgccggtggctgtgggtccctacgggcagtcccagcccagctgcttcgaccgcgtgaagatgggctttgtcatgggttgcgccgtgggtatggcggccggggccctgttcggcaccttctcctgtctcaggatcggaatgcggggtcgggagctgatgggcggcattgggaaaaccatgatgcagagtggcggtacctttggcactttcatggccatcggaatgggcatacgatgctaattagggcacggatgccctgctacacccaaacttcctcatccatttcgaaccttgtacaataaagtttttttcttcttgttaaaaaaaaaaaaaaaa

SEQ ID NO: 365 - DNA, 854 bp, Rat
gcggtggctcctctgtgtcccacgtcctgaggggctcaggacaagaaaggagcccacccccagccagtatgcagccgccctggggcctggcgctccctctgctgctcccctgggtggcaggtggagtagggaccagcccacgggattattggttgccagcactggcacaccagcctggggtctgtcactacggaactaagacggcctgctgctatggctggaaaaggaacagcaaaggagtatgtgaagctgtgtgtgagcccagatgcaagtttggtgagtgtgtgggaccgaataaatgtagatgctttccaggatacaccgggaagacctgcagtcaagacgtgaatgagtgtgcattcaaaccccggccatgccagcacagatgtgtgaatacacacggtagctacaaatgcttttgcctcagcggccacatgcttctaccagacgccacatgttcaaactccaggacatgtgccagaataaactgccagtacagttgtgaagacacagcagaagggccacgatgtgtgtgtccatcctctggcctccgcctgggtccaaatggaagagtgtgcctagatatcgatgaatgtgcttctagcaaagcagtctgtccttccaatagaagatgtgtgaacacatttggaagctactactgcaaatgtcacattggttttgaactgaaatatatcagtcgccgatatgattgtgtagatataaatgagtgcactctgaatacccgtacgtgcagcccccatgccaattgcctcaatacccaaggatccttcaagtgcaaatgcaagcagggatacagggggaatggactgcagtgttctgtgattcctgaacat

SEQ ID NO: 366 - DNA, 257 bp, Rat
ggcgcacccatgtacttcagcgagggccgagagagaggcaaggtgtatgtctacaacctgagacagaaccggtttgtttttaatggcactctgaaggattcccacagctaccagaacgcccggttcgggtcatgcattgcctccgttcaagacctcaaccaagattcctacaatgacgtggtggtgggggcccctcaggaggacagccacagaggggccatctacatcttccatggcttccaaaccaacatcctgaa

SEQ ID NO: 367 - DNA, 475 bp, Rat
cttccaaaccaacatcctgaagaagcccgtgcagagaatatcagcctcagagctggctcccggcttgcagcattttggctgcagcatccacggacaactggacctcaatgaggacgggcttgtggacctagcagtgggcgccctgggcaacgctgtggttttgtgggcgcgtcccgtagttcagatcaacgccagcctccactttgagccttccaagatcaacatcttccacaaggactgcaagcgcaatggcagggatgccacctgcctggctgccttcctctgcttcggacctatcttcctggcaccccacttccacacagcaaccgtcggcatcaggtacaatgcaaccatggatgagagacggtatatgccacgggcacatctggatgagggtgcagaccagttcaccaacagggctgtcctactctcttctggtcaggaacactgtcaaaggatcaacttccacgtcctg

SEQ ID NO: 368 - DNA, 392 bp, Mouse
gccgcggagcaggaagcgagcagccggcggaggcgcggcggcgccgggccggccttgttttcctcaggctcgctccgctctgagccgcagcctcgcttgcctcaggctcgctctcggccgcggccttctttccttcaggctcggtcgcggccttgcttgtcccaggcttgctccccggccgcctccgtcctctcttcaagctcgctctgcggccgttcccacctccttccaggctcgctccccgccaccgcattcctcctcctcctcccaggctcgctcccgggccgccgcccctcagccgcccaggctgcgccggtgctcgcgtggggccttgttgcgtttcagctcggggtcgccgcaggggcggggcgctgagcggtctgccgcggcct

SEQ ID NO: 369 - DNA, 824 bp, Rat
cgggcactgtgactgccaagccggctatgggggcgaggcctgtggccagtgtggccttggctactttgaggcagagcgcaacagcagccatctggtatgttcggcgtgctttggtccctgtgcccgctgcacaggacccgaggaatcccactgtctgcagtgcaggaaaggctgggccctgcatcacctcaagtgtgtagacatcgatgagtgtggcacagagcaagctacctgtggagccgaccagttctgtgtgaacacggaagggtcctatgagtgccgagattgtgcaaaggcctgcctgggctgtatgggagcagggccagggccctgcaaaaaatgcagccgtggctaccagcaggtgggctccaagtgcctagatgtggatgagtgtgagacagtggtgtgtccaggagagaacgagcagtgtgaaaacacggaaggtagctaccgctgtgtctgtgctgaaggcttcagacaggaggacggcatctgtgtgaaggagcagatcccagagtcggcgggcttcttcgcggagatgacagaggacgaaatggtggtcctgcagcagatgttctttggtgtgatcatctgtgcactggccacacttgctgctaagggggacttggtgttcaccgccatcttcattggagctgtggcagctatgactgggtactggttgtcagagcgcagtgaccgtgtgctggagggcttcatcaagggtagataatccctgccaccacttacaggatttcctcccacccaggctgcccctagaggttatttctctctcccgctggacacctgggacagcattgtttctc

SEQ ID NO: 370 - DNA, 1663 bp, Mouse
gcagcacccagcgccaagcgcaccaggcaccgcgacagacggcaggagcacccatcgacgggcgtactggagcgagccgagcagagcagagagaggcgtgcttgaaaccgagaaccaagccgggcggcatcccccggccgccgcacgcacaggccggcgccctccttgcctccctgctccccaccgcgcccctccggccagcatgaggctcctggcggccgcgctgctcctgctgctcctggcgctgtgcgcctcgcgcgtggacgggtccaagtgtaagtgttcccggaaggggcccaagatccgctacagcgacgtgaagaagctggaaatgaagccaaagtacccacactgcgaggagaagatggttatcgtcaccaccaagagcatgtccaggtaccggggccaggagcactgcctgcaccctaagctgcagagcaccaaacgcttcatcaagtggtacaatgcctggaacgagaagcgcagggtctacgaagaatagggtggacgatcatggaaagaaaaactccaggccagttgagagacttcagcagaggactttgcagattaaaataaaagccctttctttctcacaagcataagacaaattatatattgctatgaagctcttcttaccagggtcagtttttacattttatagctgtgtgtgaaaggcttccagatgtgagatccagctcgcctgcgcaccagacttcattacaagtggctttttgctgggcggttggcggggggcggggggacctcaagcctttcctttttaaaataaggggttttgtatttgtccatatgtcaccacacatctgagctttataagcgcctgggaggaacagtgagcatggttgagaccgttcacagcactactgctccgctccaggcttacaaagcttccgctcagagagcctggcggctctgtgcagctgccacaggctctcctgggcttatgactggtcagagtttcagtgtgactccactgtggcccctgttgcagggcaattgggagcaggtccttctacatctgtgcctagaggaactcagtctacttaccagaaggagcttcatccccaccccacccccacccgcaccccagctcattcccctgtcacgaccaggcaagtgatccttaaaggagctgggtctttttcttgcaaactgagggtttctgaaaggtcggctgctttggtagaagatgcttctgaggcatccaaagtccccagcagtgtgagaaaatgattctcgatgttcgggaggacaagggaagatgcaggattagatgcaggacacacagccagagctacacatcctcttggcaatgggagctccccccccccaaagctttgtttctttccctcaccccaacagaaagtgcactccccctcagtgaatacgcaaacagcactgttctctgagttaggatgttaggacgatcctgcgccctgccctctcctgtgtacatattgccttcagtacccctcccccaccccatgccacacactgcccctcattagaggccgcactgtatggctgtgtatctgctatgtaaatgctgagacccctgagtgctgcatgcaggtttcatgttctttctaagatgaaaagagaaagtaataaaatatatttgaagttccccaaaaaaaaaaaaaaa

SEQ ID NO: 371 - DNA, 568 bp, Human
ccgtcagtctagaaggataagagaaagaaagttaagcaactacaggaaatggctttgggagttccaatatcagtctatcttttattcaacgcaatgacagcactgaccgaagaggcagccgtgactgtaacacctccaatcacagcccagcaaggtaactggacagttaacaaaacagaagctgacaacatagaaggacccatagccttgaagttctcacacctttgcctggaagatcataacagttactgcatcaacggtgcttgtgcattccaccatgagctagagaaagccatctgcaggtgtctaaaattgaaatcgccttacaatgtctgttctggagaaagacgaccactgtgaggcctttgtgaagaattttcatcaaggcatctgtagagatcagtgagcccaaaattaaagttttcagatgaaacaacaaaacttgtcaagctgactagactcgaaaataatgaaagttgggatcacaatgaaatgagaagataaaattcagcgttggcctttagactttgccatccttaaggagtgatggaagccaagtgaacaagcc

SEQ ID NO: 372 - DNA, 5583 bp, Rat
ctggtgcagagcgtcgccaaggacgccgggagggaggcgggattgccaagatatcctccagtgaagtgcatgtgtgtgtgcaaaccatccttggctgtcgcgaagcagagaagacggcttggggctgctgctgtgccgcaggagtggagagaccccgtgagctgagccctgcgccccgcatcaccgctcggcgcccccaaggctgcctgaatacccggtgcgccccggcgcgcgacatgaccagtctctccgagggctctgctttggacctgccaggcccttgcgccttctagcttcggggggaatccactttgatcagggccaccattactgttaaagccccctcctcagccttgtactcttcccactggaatcggatttgctagagggtgccgtggaatcggaagtcctcccttgtcctcaagcaaccagcctctgcatcttcgcggacactgcaagtaggagctcttttaccaccaagttgaagtcgcgctctgtcctcacagctgcttcggggtctaccccaagcctgagtcgggcctattgatattcaggacctgaagttgcccacggatcttgtgctctgctagaaaggcttggagagcggaggaaagacgtgtgcttctgtctgctctcctgccccatatcactgttccatattactgtgtgagcatctctccgggtgctgtgggctgcaagaccagcgccaggaactgggcctcggacaccgtccacttttcacgcaaccgaaagctaaagtccctcaaagcaaggggtctgttgggaagatgagtggcattggctggcagacactgtccctatctctggcgttagtgttgtcgatcttgaacaaggtggcgcctcatgcgtgcccggcccagtgctcctgttcaggcagcacagtggactgtcatgggctggcactgcgcagtgtgcccaggaatatcccccgcaacacggagagactggatttgaatggaaataacatcacaaggatcacgaagacagattttgcgggtctcagacacctcagagttcttcagctcatggagaacaagatcagcaccatcgagaggggagcattccaggatcttaaggagctagaaagactgcgtttaaacagaaataaccttcagttgtttcctgagctgctgtttcttgggactgcgaagctctaccggcttgatctcagtgaaaatcagattcaagcaattccaaggaaggctttccgtggtgcagttgacattaaaaatctgcagttggattacaaccagatcagctgcattgaagatggggcattccgagctctgcgagatctggaagtgctcactctgaacaataacaatattactagactttcagtggcaagtttcaaccatatgcctaaacttaggacatttcgactccactccaacaacctatactgcgactgccacctggcctggctctcggactggcttcgccaaaggccacgggtgggcttgtacactcagtgtatgggcccatcccacctgaggggccataatgtagcagaggttcaaaaacgagagtttgtctgcagtggtcaccagtcattcatggctccctcctgcagtgtgctgcactgcccgattgcttgtacctgtagcaacaacattgtagactgccgagggaaaggtctcactgagatccccacaaatctgcctgagaccatcacagaaatacgtttggaacagaactccataagggtcatccctccaggagcattctcaccatacaaaaagcttcgacgactagacctgagtaataaccagatctcggaacttgctccagatgccttccaaggactgcgttctctgaattcccttgtcctgtatggaaataaaatcacagaactcccaaaaagtttatttgaaggactgttttccttacagctactattattgaatgccaacaagataaactgccttcgggtagatgcttttcaggacctgcacaacttgaaccttctctccttatacgacaataagcttcagactgttgccaagggcaccttctcagctctcagagccatccaaactatgcatttggcccagaatcctttcatttgtgactgccatctcaagtggctagcggattatctccacaccaacccaattgagaccagcggtgcccgttgcaccagtccccgccgcctggctaacaaaagaattggacagatcaaaagcaagaaattccgttgttcagctaaagagcagtatttcattccaggtacagaagattatcgatcaaaattaagtggagactgctttgcagacttggcttgtcctgaaaaatgtcgctgtgaagggaccacagtagactgctccaatcaaaaactcaacaaaatcccagaccatattccccagtacacagcagagctgcgtctcaataataatgaattcacagtgttagaagccacgggaatatttaagaaacttcctcaattgcgtaaaatcaaccttagcaacaataagatcactgatatcgaggagggggcattcgaaggtgcgtctggtgtgaatgagattctgcttaccagtaaccgtttggaaaatgttcagcataagatgttcaaaggattggagagcctcaaaacattgatgctgagaagtaatcgaataagctgtgtgggaaacgacagtttcacaggactcggttctgtgcgtctgctctctttatatgacaatcaaattaccacagttgcaccaggagcatttggtactctccattcattatctacactaaacctcttggccaatcctttcaactgtaactgtcacctggcatggcttggagaatggctcagaaggaaaagaattgtaacaggaaatcctcgatgccaaaaaccctacttcttgaaggaaataccaatccaggatgtagccattcaggacttcacctgtgatgacggaaacgatgataatagctgctctccactctcccgttgtccttcggaatgtacttgcttggatacagtagtacgatgtagcaacaagggcttgaaggtcttacctaaaggcattccaagagatgtcacagaactgtatctggatgggaaccagtttacactggtcccgaaggaactctccaactacaaacatttaacacttatagacttaagtaacaacagaataagcaccctttccaaccaaagcttcagcaacatgacccaacttctcaccttaattctcagttacaaccgtctgagatgtatccctccacggacctttgatggattgaaatctcttcgtttactgtctctacatggaaatgacatttctgtcgtgcctgaaggtgcctttggtgacctttcagccttgtcacacttagcaattggagccaaccctctttactgtgattgtaacatgcagtggttatccgactgggtgaagtcggaatataaggaacctggaattgcccgctgtgccggtcccggagaaatggcagataaattgttactcacaactccctccaaaaaatttacatgtcaaggtcctgtggatgttactattcaagccaagtgtaacccctgcttgtcaaatccatgtaaaaatgatggcacctgtaacaatgacccggtggatttttatcgatgcacctgcccatatggtttcaagggccaggactgtgatgtccccattcatgcctgtatcagtaatccatgtaaacatggaggaacttgccatttaaaagaaggagagaatgatggattctggtgtacttgtgctgatgggtttgaaggagaaagctgtgacatcaatattgatgattgcgaagataatgattgtgaaaataattctacatgcgttgatggaattaacaactacacgtgtctttgcccaccggaatacacaggcgaactgtgtgaggaaaaactggacttctgtgcacaagacctgaatccctgccagcatgactccaagtgcatcctgacgccaaagggattcaagtgtgactgcactccgggatacattggtgagcactgtgacatcgactttgatgactgccaagataacaagtgcaaaaacggtgctcattgcacagatgcagtgaacggatacacatgtgtctgtcctgaaggctacagtggcttgttctgtgagttttctccacccatggtcctccttcgcaccagcccctgtgataattttgattgtcagaatggagcccagtgtatcatcagggtgaatgaaccaatatgccagtgtttgcctggctacttgggagagaagtgtgagaaattggtcagtgtgaattttgtaaacaaagagtcctatcttcagattccttcagccaaggttcgacctcagacaaacatcacacttcagattgccacagatgaagacagcggcatcctcttgtacaagggtgacaaggaccacattgctgtggaactctatcgagggcgagttcgagccagctatgacaccggctctcacccggcttctgccatttacagtgtggagacaatcaatgatggaaacttccacattgtagagctactgaccctggattcgagtctttccctctctgtggatggaggaagccctaaaatcatcaccaatttgtcaaaacaatctactctgaatttcgactctccactttacgtaggaggtatgcctgggaaaaataacgtggcttcgctgcgccaggcccctgggcagaacggcaccagcttccatggctgtatccggaacctttacattaacagtgaactgcaggacttccggaaagtgcctatgcaaaccggaattctgcctggctgtgaaccatgccacaagaaagtgtgtgcccatggcacatgccagcccagcagccaatcaggcttcacctgtgaatgtgaggaagggtggatggggcccctctgtgaccagagaaccaatgatccctgtctcggaaacaaatgtgtacatgggacctgcttgcccatcaacgccttctcctacagctgcaagtgcctggagggccacggcggggtcctctgtgatgaagaagaagatctgtttaacccctgccaggtgatcaagtgcaagcacgggaagtgcaggctctctgggctcgggcagccctattgtgaatgcagcagtggattcaccggggacagctgtgacagagaaatttcttgtcgaggggaacggataagggattattaccaaaagcagcagggttacgctgcctgtcaaacgactaagaaagtatctcgcttggagtgcagaggcgggtgtgctggggggcagtgctgtggacctctgagaagcaagaggcggaaatactctttcgaatgcacagatggatcttcatttgtggacgaggtcgagaaggtggtgaagtgcggctgcacgagatgtgcctcctaagtgcagctcgagaagcttctgtctttggcgaaggttgtacacttcttgaccatgttggactaattcatgcttcataatggaaatatttgaaatatattgtaaaatacagaacagacttatttttattatgataataaagacttgtctgcatttggaaaaaaaataaaataaaagacacgcttgtactaaaaaaaaaaaaaaaaaa

SEQ ID NO: 373 - protein, 83 aa, Mouse
MPLPLLLAALCLAASPAPARACQLPSEWRPLSEGCRAELAETIVYAKVLALHPEVPGLYNYLPWQYQAGEGGLFYSAEVEMLV

SEQ ID NO: 374 - protein, 405 aa, Mouse
MPPLLLLPAIYMLLFFRVSPTISLQEVHVNRETMGKIAVASKLMWCSAAVDILFLLDGSHSIGKGSFERSKRFAIAACDALDISPGRVRVGALQFGSTPHLEFPLDSFSTRQEVKESIKGIVFKGGRTETGLALKRLSRGFPGGRNGSVPQILIIVTDGKSQGPVALPAKQLRERGIVVFAVGVRFPRWDELLTLASEPKDRHVLLAEQVEDATNGLLSTLSSSALCTTADPDCRVEPHPCERRTLETVRELAGNALCWRGSRQADTVLALPCPFYSWKRVFQTHPANCYRTICPGPCDSQPCQNGGTCIPEGVDRYHCLCPLAFGGEVNCAPKLSLECRIDVLFLLDSSAGTTLGGFRRAKAFVKRFVQAVLREDSRARVGIASYGRNLMVAVPCRGVPALCRT

SEQ ID NO: 375 - protein, 180 aa, Mouse
MELSDVTLIEGVGNEVMVVAGVVALTLALVLAWLSTYVADSGNNQLLGTIVSAGDTSVLHLGHVDQLVNQGTPEPTEHPHPSGGNDDKAEETSDSGGDATGEPGARGEMEPSLEHLLDIQGLPKRQAGLGSSRPEAPLGLDDGSCLSPSPSLINVRLKFLNDTEELAVARPEDTVGTLKR

SEQ ID NO: 376 - protein, 68 aa, Mouse
MCLPVTVWCHWALWVAHLPLIPSVGKSQCTQMWHCCMPWVCVGDCLCLSDPLWLCLLKETETPCGFLS

SEQ ID NO: 377 - protein, 107 aa, Rat
MPFRLLIPLGLVCVLLPLHHGAPGPEGTAPDPAHYRERVKAMFYHAYDSYLENAFPYDELRPLTCDGHDTWGSFSLTLIDALDTLLILGNTSEFQRVVEVLQDKRGL

SEQ ID NO: 378 - protein, 95 aa, Rat
MWFLPCSVPLVISSCHSQASPHWPYGIISGGQEGLCRLWTATCHSRGESEVSRSSRKEDPRIPQGSLSGNVDFWRVCPPCAHTSMDRTLGLLSCC

SEQ ID NO: 379 - protein, 138 aa, Mouse
MDLDVVNMFVIAGGTLAIPILAFVASFLLWPSALIRIYYWYWRRTLGMQVRYAHHEDYQFCYSFRGRPGHKPSILMLHGFSAHKDMWLSVVKFLPKNLHLVCVDMPGHEGTTRSSLDDLSIVGQVKRIHQFVECLKLN

SEQ ID NO: 380 - protein, 81 aa, Rat
MASSSNWLSGVNVVLVMAYGSLVFVLLFIFVKRQIMRFAMKSRRGPHVPVGHNAPKDLKEEIDIRLSRVQDIKYEPQLLAD

SEQ ID NO: 381 - protein, 257 aa, Mouse
MRSGALWPLLWGALVWTVGSVGAVMGSEDSVPGGVCWLQQGREATCSLVLKTRVSREECCASGNINTAWSNFTHPGNKISLLGFLGLVHCLPCKDSCDGVECGPGKACRMLGGRPTLRSCVPNCEGLPAGFQVCGSDGATYRDECELRTARCRGHPDLRVMYRGRCQKSCAQVVCPRPQSCLVDQTGSAHCVVCRAAPCPVPSNPGQELCGNNNVTYISSCHLRQATCFLGRSIGVRHPGICTGGPKVPAEEEENFV

SEQ ID NO: 382 - protein, 285 aa, Rat
MISWMLLACALPCAADPMLGAFARRDFQKGGPQLVCSLPGPQGPPGPPGAPGSSGMVGRMGFPGKDGQDGQDGDRGDSGEEGPPGRTGNRGKQGPKGKAGAIGRAGPRGPKGVSGTPGKHGIPGKKGPKGKKGEPGLPGPCSCGSSRAKSAFSVSVTKSYPRERLPIKFDKILMNEGGHYNASSGKFVCSVPGIYYFTYDITLANKHLAIGLVHNGQYRIRTFDANTGNHDVASGSTILALKEGDEVWLQIFYSEQNGLFYDPYWTDSLFTGFLIYADQGDPNEV

SEQ ID NO: 383 - protein, 183 aa, Rat
MKLLCLVAVVGCLLVPPAQANKSSEDIRCKCICPPYRNISGHIYNQNVSQKDCNCLHVVEPMPVPGHDVEAYCLLCECRYEERSTTTIKVIIVIYLSVVGALLLYMAFLMLVDPLIRKPDAYTEQLHNEEENEDARSMAAAAASIGGPRANTVLERVEGAQQRWKLQVQEQRKTVFDRHKMLS

SEQ ID NO: 384 - protein, 292 aa, Mouse
CQLPLRVLIISNNKLGALPPDISTLGSLRQLDVSSNELQSLPVELCSLRSLRDLNVRRNQLSTLPDELGDLPLVRLDFSCNRISRIPVSFCRLRHLQVVLLDSNPLQSPPAQICLKGKLHIFKYLTMEAGRRGAALGDLVPSRPPSFSPCPAEDLFPGRRYDGGLDSGFHSVDSGSKRWSGNESTDDFSELSFRISELARDPRGPRQPREDGAGDGDLEQIDFIDSHVPGEDEDRSAAEEQLPSELSLVAGDVEKPSSSRREEPAGEERRRPDTLQLWQERERKQQQQSGGW

SEQ ID NO: 385 - protein, 164 aa, Mouse
SRQLRAPRFDPRAGFHAEGKDRGPSVPQGLLKAARSSGQLNLAGRNLGEVPQCVWRINVDIPEEANQNLSFSSTERWWDQTDLTKLIISSNKLQSLSDDLRLLPALTVLDIHDNQLTSLPSAIRELDNLQKLNVSHNKLKILPEEITSLKNLRTLHLQHNELTC

SEQ ID NO: 386 - protein, 71 aa, Mouse
SLSILPAVRVSPRPTYPSTASSMAAFLVTGFFFSLFVVLGMEPRALFRPDKALPLSCAKPTSLCVQSSFLG

SEQ ID NO: 387 - protein, 126 aa, Mouse
EYEARVLEKSLRKESRNKETDKVKLTWRDRFPAYFTNLVSIIFMIAVTFAIVLGVIIYRISTAAALAMNSSPSVRSNIRVTVTATAVIINLVVIILLDEVYGCIARWLTKIGECHVQDSIGSMGLG

SEQ ID NO: 388 - protein, 84 aa, Rat
AAENEMPVAVGPYGQSQPSCFDRVKMGFVMGCAVGMAAGALFGTFSCLRIGMRGRELMGGIGKTMMQSGGTFGTFMAIGMGIRC

SEQ ID NO: 389 - protein, 284 aa, Rat
GGSSVSHVLRGSGQERSPPPASMQPPWGLALPLLLPWVAGGVGTSPRDYWLPALAHQPGVCHYGTKTACCYGWKRNSKGVCEAVCEPRCKFGECVGPNKCRCFPGYTGKTCSQDVNECAFKPRPCQHRCVNTHGSYKCFCLSGHMLLPDATCSNSRTCARINCQYSCEDTAEGPRCVCPSSGLRLGPNGRVCLDIDECASSKAVCPSNRRCVNTFGSYYCKCHIGFELKYISRRYDCVDINECTLNTRTCSPHANCLNTQGSFKCKCKQGYRGNGLQCSVIPEH

SEQ ID NO: 390 - protein, 85 aa, Rat
GAPMYFSEGRERGKVYVYNLRQNRFVFNGTLKDSHSYQNARFGSCIASVQDLNQDSYNDVVVGAPQEDSHRGAIYIFHGFQTNIL

SEQ ID NO: 391 - protein, 158 aa, Rat
FQTNILKKPVQRISASELAPGLQHFGCSIHGQLDLNEDGLVDLAVGALGNAVVLWARPVVQINASLHFEPSKINIFHKDCKRNGRDATCLAAFLCFGPIFLAPHFHTATVGIRYNATMDERRYMPRAHLDEGADQFTNRAVLLSSGQEHCQRINFHVL

SEQ ID NO: 392 - protein, 124 aa, Mouse
AAEQEASSRRRRGGAGPALFSSGSLRSEPQPRLPQARSRPRPSFLQARSRPCLSQACSPAASVLSSSSLCGRSHLLPGSLPATAFLLLLPGSLPGRRPSAAQAAPVLAWGLVAFQLGVAAGAGR

SEQ ID NO: 393 - protein, 242 aa, Rat
GHCDCQAGYGGEACGQCGLGYFEAERNSSHLVCSACFGPCARCTGPEESHCLQCRKGWALHHLKCVDIDECGTEQATCGADQFCVNTEGSYECRDCAKACLGCMGAGPGPCKKCSRGYQQVGSKCLDVDECETVVCPGENEQCENTEGSYRCVCAEGFRQEDGICVKEQIPESAGFFAEMTEDEMVVLQQMFFGVIICALATLAAKGDLVFTAIFIGAVAAMTGYWLSERSDRVLEGFIKGR

SEQ ID NO: 394 - protein, 99 aa, Mouse; identical to SEQ ID NO: 340

SEQ ID NO: 395 - protein, 103 aa, Human
MALGVPISVYLLFNAMTALTEEAAVTVTPPITAQQGNWTVNKTEADNIEGPIALKFSHLCLEDHNSYCINGACAFHHELEKAICRCLKLKSPYNVCSGERRPL

SEQ ID NO: 396 - protein, 1529 aa, Rat
MSGIGWQTLSLSLALVLSILNKVAPHACPAQCSCSGSTVDCHGLALRSVPRNIPRNTERLDLNGNNITRITKTDFAGLRHLRVLQLMENKISTIERGAFQDLKELERLRLNRNNLQLFPELLFLGTAKLYRLDLSENQIQAIPRKAFRGAVDIKNLQLDYNQISCIEDGAFRALRDLEVLTLNNNNITRLSVASFNHMPKLRTFRLHSNNLYCDCHLAWLSDWLRQRPRVGLYTQCMGPSHLRGHNVAEVQKREFVCSGHQSFMAPSCSVLHCPIACTCSNNIVDCRGKGLTEIPTNLPETITEIRLEQNSIRVIPPGAFSPYKKLRRLDLSNNQISELAPDAFQGLRSLNSLVLYGNKITELPKSLFEGLFSLQLLLLNANKINCLRVDAFQDLHNLNLLSLYDNKLQTVAKGTFSALRAIQTMHLAQNPFICDCHLKWLADYLHTNPIETSGARCTSPRRLANKRIGQIKSKKFRCSAKEQYFIPGTEDYRSKLSGDCFADLACPEKCRCEGTTVDCSNQKLNKIPDHIPQYTAELRLNNNEFTVLEATGIFKKLPQLRKINLSNNKITDIEEGAFEGASGVNEILLTSNRLENVQHKMFKGLESLKTLMLRSNRISCVGNDSFTGLGSVRLLSLYDNQITTVAPGAFGTLHSLSTLNLLANPFNCNCHLAWLGEWLRRKRIVTGNPRCQKPYFLKEIPIQDVAIQDFTCDDGNDDNSCSPLSRCPSECTCLDTVVRCSNKGLKVLPKGIPRDVTELYLDGNQFTLVPKELSNYKHLTLIDLSNNRISTLSNQSFSNMTQLLTLILSYNRLRCIPPRTFDGLKSLRLLSLHGNDISVVPEGAFGDLSALSHLAIGANPLYCDCNMQWLSDWVKSEYKEPGIARCAGPGEMADKLLLTTPSKKFTCQGPVDVTIQAKCNPCLSNPCKNDGTCNNDPVDFYRCTCPYGFKGQDCDVPIHACISNPCKHGGTCHLKEGENDGFWCTCADGFEGESCDINIDDCEDNDCENNSTCVDGINNYTCLCPPEYTGELCEEKLDFCAQDLNPCQHDSKCILTPKGFKCDCTPGYIGEHCDIDFDDCQDNKCKNGAHCTDAVNGYTCVCPEGYSGLFCEFSPPMVLLRTSPCDNFDCQNGAQCIIRVNEPICQCLPGYLGEKCEKLVSVNFVNKESYLQIPSAKVRPQTNITLQIATDEDSGILLYKGDKDHIAVELYRGRVRASYDTGSHPASAIYSVETINDGNFHIVELLTLDSSLSLSVDGGSPKIITNLSKQSTLNFDSPLYVGGMPGKNNVASLRQAPGQNGTSFHGCIRNLYINSELQDFRKVPMQTGILPGCEPCHKKVCAHGTCQPSSQSGFTCECEEGWMGPLCDQRTNDPCLGNKCVHGTCLPINAFSYSCKCLEGHGGVLCDEEEDLFNPCQVIKCKHGKCRLSGLGQPYCECSSGFTGDSCDREISCRGERIRDYYQKQQGYAACQTTKKVSRLECRGGCAGGQCCGPLRSKRRKYSFECTDGSSFVDEVEKVVKCGCTRCAS

SEQ ID NO: 397 - protein, 8 aa, Mouse
WYNAWNEK

SEQ ID NO: 398 - protein, 7 aa, Mouse
MVIITTK

SEQ ID NO: 399 - DNA, 2206 bp, Rat; identical to SEQ ID NO: 219

SEQ ID NO: 400 - DNA, 160 bp, Mouse
tcgcaggacgctcactggacagcttgggcttttttcagttgattttatggtttgcatctttctctttctctttttctgtttcttgttcccctttccccttttcctggtgagaaagcacatattactgagccattgcaagcaatgggaggggtccacaatg

SEQ ID NO: 401 - DNA, 430 bp, Rat
ggcaccagcccggcttctgtgctccgctcagtctccagcgatccctccctacctccgccctccatggcgtcgctcctgtgctgtgggcctaagctggccgcctgtggcatcgtcctcagcgcctggggagtgatcatgttgataatgctcgggatatttttcaatgtccattctgctgtgttaattgaggatgtccccttcacagagaaagattttgagaacggccctcagaacatatacaacctgtacgagcaagtcagctacaactgtttcatcgccgcgggcctctacctcctcctcgggggcttctccttctgccaagttcgtctcaataagcgcaaggaatacatggtgcgctagagcgcagtccgactctccccattcccctccttatttaaagactcctcagtccatctgttccactcatctg

SEQ ID NO: 402 - DNA, 190 bp, Rat
ccgaatacgcggccgcgtcgacatactgcctgtagagttagtatttctgttttttatatgttgcacactgaattgaagaaatgttggtttttcttgttttgttttagtttgtttctttggttttgtttttggttttgctttttacttcccaggtttgactatttgccaatgccgtcgacgcggccgcgaa

SEQ ID NO: 403 - DNA, 1774 bp, Mouse
ccaaagtggagggcgagggccggggccggtgggctctggggctgctgcgcaccttcgacgccggcgaattcgcaggctgggagaaggtgggctcgggcggcttcgggcaggtgtacaaggtgcgccatgtgcactggaagacgtggctcgcgatcaagtgctcgcccagtctgcacgtcgacgacagggaacgaatggagctcctggaggaagctaagaagatggagatggccaagttccgatacattctacctgtgtacggcatatgccaggaacctgtcggcttggtcatggagtacatggagacaggctccctggagaagctgctggcctcagagccattgccttgggacctgcgctttcgcatcgtgcacgagacagccgtgggcatgaacttcctgcattgcatgtctccgccactgctgcacctagacctgaagccagcgaacatcctgctggatgcccactaccatgtcaagatttctgactttgggctggccaagtgcaatggcatgtcccactctcatgacctcagcatggatggcctgtttggtacaatcgcttacctccctccagagcgaattcgtgagaagagccgcttgtttgacaccaaacatgatgtatacagcttcgccattgtgatctggggtgtgcttacacagaagaagccatttgcagatgaaaagaacatcctacacatcatgatgaaagtggtaaagggccaccgcccagagctgccacccatctgcagaccccggccgcgtgcctgtgccagcctgatagggataatgcaacggtgctggcatgcagacccacaggtgcggcccaccttccaagaaattacctctgaaacagaagacctttgtgagaagcctgatgaggaggtgaaagacctggctcatgagccaggcgagaaaagctctctagagtccaagagtgaggccaggcccgagtcctcacgcctcaagcgcgcctctgctccccccttcgataacgactgcagtctctccgagttgctgtcacagttggactctgggatctcccagactcttgaaggccccgaagagctcagccgaagttcctctgaatgcaagctcccatcgtccagcagtggcaagaggctctcgggggtgtcctcagtggactcagccttttcctccagaggatcgctgtcactgtcttttgagcgggaagcttcaacaggcgacctgggccccacagacatccagaagaagaagctagtggatgccatcatatcaggggacaccagcaggctgatgaagatcctacagccccaagatgtggacttggttctagacagcagtgccagcctgctgcacctggctgtggaggccggacaggaggagtgtgtcaagtggctgctgcttaacaatgccaaccccaacctgaccaacaggaagggctctacaccactgcatatggctgtggagcggaagggacgtggaattgtggagctactgctagcccggaagaccagtgtcaatgccaaggatgaagaccagtggactgccctgcactttgcagcccagaatggggatgaggccagcacaaggctgctgctagagaagaatgcttctgtcaatgaggtggactttgagggccgaacacccatgcatgtagcctgccagcatggacaggagaacattgtgcgcaccctgctccgccgtggtgtggatgtgggcctgcagggaaaggatgcctggttgcctctgcactatgctgcctggcaaggccaccttcccattggtaagct

SEQ ID NO: 404 - DNA, 372 bp, Mouse
ccacagcacatcgtcctgactgtcctcttcccagggaccaagagctagagacccggctgtgactgcccgcctctggggcttcctttagaggagacagtctttacccatctagactcctgccaccctgactgctgacttacagctatgaggtcccggcttctgctgcccgtgccccatttgccaacgattcgggaaatgtcagaagagctgtcacatggggcagctgggcaggaacccccagcgtcccccagcctggatgactacgtcaggtgtatctgtcagctggcacagcccacctcagtgctggacaaggtcacagcccagagccgtcccaacagaccctcccggccagcctggactcgagagaagagg

SEQ ID NO: 405 - DNA, 396 bp, Mouse
gagcttcgaagctttctccgtcttccaagacgacaggtttctggggccacaagaggccgagcctcttcattttgttttcttctccaggctgaagacctgaacgtcaagttggaaggggagccttccatgcggaaaccaaagcagcggccgcggccggagcccctcatcatccccaccaaggcgggcactttcatcgcccctcctgtctactccaacatcaccccttaccagagccacctgcgctctcccgtgcgccttgctgaccacccctctgagcggagctttgagccccccccttacacaccaccccccattctcagccccgtccgggaaggctctggcctctacttcaatgccatcatatcaaccagcaacatcccggcccctcctgtatca

SEQ ID NO: 406 - protein, 444 aa, Rat; identical to SEQ ID NO: 296

SEQ ID NO: 407 - protein, 53 aa, Mouse
RRTLTGQLGLFSVDFMVCIFLFLFFCFLFPFPLFLVRKHILLSHCKQWEGSTM

SEQ ID NO: 408 - protein, 119 aa, Rat
GTSPASVLRSVSSDPSLPPPSMASLLCCGPKLAACGIVLSAWGVIMLIMLGIFFNVHSAVLIEDVPFTEKDFENGPQNIYNLYEQVSYNCFIAAGLYLLLGGFSFCQVRLNKRKEYMVR

SEQ ID NO: 409 - protein, 590 aa, Mouse
KVEGEGRGRWALGLLRTFDAGEFAGWEKVGSGGFGQVYKVRHVHWKTWLAIKCSPSLHVDDRERMELLEEAKKMEMAKFRYILPVYGICQEPVGLVMEYMETGSLEKLLASEPLPWDLRFRIVHETAVGMNFLHCMSPPLLHLDLKPANILLDAHYHVKISDFGLAKCNGMSHSHDLSMDGLFGTIAYLPPERIREKSRLFDTKHDVYSFAIVIWGVLTQKKPFADEKNILHIMMKVVKGHRPELPPICRPRPRACASLIGIMQRCWHADPQVRPTFQEITSETEDLCEKPDEEVKDLAHEPGEKSSLESKSEARPESSRLKRASAPPFDNDCSLSELLSQLDSGISQTLEGPEELSRSSSECKLPSSSSGKRLSGVSSVDSAFSSRGSLSLSFEREASTGDLGPTDIQKKKLVDAIISGDTSRLMKILQPQDVDLVLDSSASLLHLAVEAGQEECVKWLLLNNANPNLTNRKGSTPLHMAVERKGRGIVELLLARKTSVNAKDEDQWTALHFAAQNGDEASTRLLLEKNASVNEVDFEGRTPMHVACQHGQENIVRTLLRRGVDVGLQGKDAWLPLHYAAWQGHLPIGK

SEQ ID NO: 410 - DNA, 339 bp, Human
atggctttgggagttccaatatcagtctatcttttattcaacgcaatgacagcactgaccgaagaggcagccgtgactgtaacacctccaatcacagcccagcaaggtaactggacagttaacaaaacagaagctgacaacatagaaggacccatagccttgaagttctcacacctttgcctggaagatcataacagttactgcatcaacggtgcttgtgcattccaccatgagctagagaaagccatctgcaggtgttttactggttatactggagaaaggtgtctaaaattgaaatcgccttacaatgtctgttctggagaaagacgaccactgtga

SEQ ID NO: 411 - DNA, 285 bp, Human
atggctttgggagttccaatatcagtctatcttttattcaacgcaatgacagcactgaccgaagaggcagccgtgactgtaacacctccaatcacagcccagcaagctgacaacatagaaggacccatagccttgaagttctcacacctttgcctggaagatcataacagttactgcatcaacggtgcttgtgcattccaccatgagctagagaaagccatctgcaggtgtctaaaattgaaatcgccttacaatgtctgttctggagaaagacgaccactgtga

SEQ ID NO: 412 - DNA, 460 bp, Human
aagagaaagaaagttaagcaactacaggaaatggctttgggagttccaatatcagtctatcttttattcaacgctgacaacatagaaggacccatagccttgaagttctcacacctttgcctggaagatcataacagttactgcatcaacggtgcttgtgcattccaccatgagctagagaaagccatctgcaggtgtctaaaattgaaatcgccttacaatgtctgttctggagaaagacgaccactgtgaggcctttgtgaagaattttcatcaaggcatctgtagagatcagtgagcccaaaattaaagttttcagatgaaacaacaaaacttgtcaagctgactagactcgaaaataatgaaagttgggatcacaatgaaatgagaagataaaattcagcgttggcctttagactttgccatccttaaggagtgatggaagccaagtgaacaagcc

SEQ ID NO: 413 - protein, 112 aa, Human
MALGVPISVYLLFNAMTALTEEAAVTVTPPITAQQGNWTVNKTEADNIEGPIALKFSHLCLEDHNSYCINGACAFHHELEKAICRCFTGYTGERCLKLKSPYNVCSGERRPL

SEQ ID NO: 414 - protein, 94 aa, Human
MALGVPISVYLLFNAMTALTEEAAVTVTPPITAQQADNIEGPIALKFSHLCLEDHNSYCINGACAFHHELEKAICRCLKLKSPYNVCSGERRPL

SEQ ID NO: 415 - protein, 73 aa, Human
MALGVPISVYLLFNADNIEGPIALKFSHLCLEDHNSYCINGACAFHHELEKAICRCLKLKSPYNVCSGERRPL

SEQ ID NO: 416 - DNA, 312 bp, Human
atggctttgggagttccaatatcagtctatcttttattcaacgcaatgacagcactgaccgaagaggcagccgtgactgtaacacctccaatcacagcccagcaagctgacaacatagaaggacccatagccttgaagttctcacacctttgcctgggagatcataacagttactgcatcaacggtgcttgtgcattccaccatgagctagagaaagccatctgcaggtgttttactggttatactggagaaaggtgtctaaaattgaaatcgccttacaatgtctgttctggagaaagacgaccactgtga

SEQ ID NO: 417 - protein, 103 aa, Human [sequence omitted]

SEQ ID NO: 418 - DNA, 846 bp, Rat
aggagagaaagagaagtgtgcacaaagaaacttgtattattattaattagcacctagcttgtttgtgtctgatacaccaccaagtagtaattgttgaaaaaacgaagaagaaaaaaaaaaaacaaaaaaaccaaacagtgggtactcaaataagataggagaaaaatgagagaacagacccagttctcgacccttgcttctcaaggtcctcccaccaggctgccaaagcaagatggtgttgctctgatccagtcagtattcttttgacttttttttttaatctccaggttttggttcaggctcccatattcataccctggctcatttagctttccctcatgttgtgggttcttctgtccctcacccccttactctccccactgatattcttcccagtcaagactgtggctctggaagaaatatccaccatttgcagagctgatgttctgtagatcgtaatgttgaagcgctgggtgtcctggttggcagaatcactcctgtattactctggtacataggtgtctcctgatagactccctggccttagtcatggggtgttttctagaggcagactaagacaggagtcaaaaaagatttagaggaaggagctgaggaaagaaagacagttgtgggaggaaaatcaagttctactcaggatcccgagtgtttctgtagatgtagattggaatgtgtccataacagagaggccagtgagagacatccccaaggacctgccaggctttccttcgctccaggaagacgcaccatcactcaaaaggggtttcctagaaagaaagacaagtgacttaaaaaatctgccagtgggttcttgaagtcatcgaacct

SEQ ID NO: 419 - DNA, 960 bp, Mouse
agagtatgaagccagagtcttagagaagtcactgagaaaagaatccagaaacaaagagaccgacaaggtgaagctgacctggagggaccgattcccagcctatttcaccaatcttgtctccatcatcttcatgatcgcagtgacatttgcaatcgtcctcggagttatcatctatagaatctccacagctgcagccttggccatgaactcctccccgtctgtgcggtccaacatccgggttacagtcacggccaccgctgttatcatcaacctcgtggtcatcattctgctggatgaagtttacggctgcattgccaggtggctcaccaagattggtgagtgccatgtgcaggacagcataggcagcatgggcctagggcagggccagccttgaagtgggcagcctggtcacagaactgtggctagtcccaacttcccctggcctggcctggctgtgagtggctagcagctggcacagtcagtaccgtatgtctctcctcagaggtcccaaagacagagaagagctttgaggagaggctaaccttcaaggccttcctgctcaagtttgtgaactcttacactcccatcttctatgtcgccttcttcaaaggccggtttgttggtcggcccggtgactacgtgtacatcttccgctctttccggatggaggagtgtgccccgggcggctgcctcatggagctctgtatccagctgagcatcattatgctgggcaagcagctaatccagaacaatctcttcgagattggcatcccgaagatgaaaaagttcatccgctacctgaagctgcgcagacagagcccctcagaccgtgaagagtacgtgaagcggaagcagcgctatgaggtggacttcaacctcgaacctttcgccggcctcacgcccgagtacatggaaatgatcattcagttcggctttgtcaccctgtttgttgcgtccttc

SEQ ID NO: 420 - DNA, 1330 bp, Mouse
gcaacttggacactaaagctaggtaccagcctgttagtttacatgagttcaaaattcaggtcagggtctctgaaatggagtctgaatttaaaagctttggcctctcatgtgaataatacatatgtcatgtgtcatttgaatagtttcagtcacacacactttgtatttctctaagtgtaacgcatgtgtagtgggtggttgtagtatgatttctccgtctttcttgtttgaatgtttggacttgtgcacgtgtgcacatgtgtgtgtgtgtgtgtgtgtgtgtgtgtgtgtgtgtgtatttgctcctgtggctatgtgcatgtgccatgtgggtgtgtgtgcttgtgggggccagaggttaggtaccttcctctatctctccaccctggtggtttttgttttgttttgttttgttttggaccaggtctatcactgataagctaggttggatggcttctgagaagagtctgcctctctgtccccctgcccctyctccccccagccctcaggttacagataagtgccacaagtccttgtcctttcaagtagcctctagggatccaggctcatatccttgtgcttactgactgagccacctctcagctccctcagccccgttttacacgttaactttgtctcctgtctatgcctgctctcttcagtgaccccttccgttttcctttcactcttttctctgaatagatttgtgtgcgagagactattatcatatggatgcataaatatcatctgcaaagtcaatcgcaggaaagacttagagtctctttagctttatgactgtaaaggattccgcttcttgccattgattcagcttttttgccattgatcctttattagagatcaattagagtcgtatacaaagaccttggctgggccctgagggtctatctcaggctaggccctgagggtctatctcaggctaggccctgagggtctatctcaggatagatggatttaactgcttttctcaagacgcttttactctctcgttgaattctttttaaacttttaattgacattgtacttgcattcttatgggaaacagggtgacccacacacatgtgtacacaggtacacacacagtcaggtcagcatagctggtatgttgttgtttatgttggggacagtcagattggtattgtttttgcactgtgctgtggaacattggaaaaccttatctgatggtgaccctgtgcctactaacagccctcactaggatacattttggagtctctggcaaccacaattttgctctatttccatgagtccagcatctctactactgcatagaagtaaaaaaaaaaaaaaaaaa

SEQ ID NO: 421 - DNA, 880 bp, Mouse
aggaccttgaccgacatccagaccacgggacccgactggatgtctcaccctgcccctgcaggccctgtcccttccaaaacaggcacttctgtcacaggatacttttttttttaacttaaatttgcttgggggaggggagcagttctagttccatgaggcacaaatggaggtcaaagagcaacttgccgatgtctcttctctcctcccactgtgtgggtagtaggaattgaatcaggttatcgatcttggggctgagccatctctgtggcccacagagcacttatatgtggttacttgttgctctcacattgtcagtgtacagcttggtggcctttgtcactggcatgctctgtgacactgttgtgataaaaatgttgatgagtttacacaaatctagtaaattgaacccaagagccaagtgtggtggtgtacccttaattccagcactttgggggcaagttcaggtagttctctgaatttgagagcctcctggcccacatagtgagttccatggctgcgtagttgcaaaagaacaccaacacctttcccccacaaatagaattgtactgaaggtcacagtcagagaaagcatagcaaggatggctgctctgagcccctcctgtgcacttctgtagacctagccccggtgtctaaatggagtctgattttagcacctgcacttgactgctgtgctccaccctgacccgccttytcctgatcccagattgctagaactttgaccaaaatgggacttaattggagttgtgattggkatgttcattgatttaaagtgctctttacattttaaggaaactaaccctttgggtaagaaaaaaaaaaaaaaaaaaaaaaaaaaaaaaaaaaaaaaaaaaaaaaaaaa

SEQ ID NO: 422 - DNA, 533 bp, Mouse
cctaaatgctgggattaaaggcgtgcgccactactgccaggctgttttttttttttttttttttttattaatgatctgccagacaaagagatgtcctttttggtgcaaaagtcacccaatgcttgaagtcactatatttgattagctctgtaactgatacacaaataaaactttccattatggataatacattatctattattatttatctcttgttcatttttgcaatttctgtacttgactcccagttgagtacaaggtgcctttggtggttttccaaggatcttgaggttacatgaaattgctgatgatgtctgttgaaagcattgtatggaggcctgaggtatatttggcctgagagcagagtttttaaaatagagcctgctggaaaagctagctggagcttctgactactttagaaaggcactgtttgaagcacaggccatgaagtaagacttgctttctagttaaattgaggttttttgtttttttaagtcwttagtgtatagagatttcctacattttttgtggtt

SEQ ID NO: 423 - DNA, 738 bp, Rat
ataaggcacatttgcttcataaaataaaaaaaaaggaaatttacttagccgcatgtcagtcacccaaattttgagtgtacaaatgaaatggaaaacatttattacacaaatttaattacaattctagggaataaacatgcaaatcagatggagctcaatctgcaggcgctgatcctctccccctggtttgcagtctgtgcacctcctggattcgcccgcgaccaggcagtcagaggcctggctcttgcaggcaggaggatcactgttgtaaagaacagcgtcacatttagcgcatctggcgtagtagcagtttttaacactttgcgcaggtgcctcccttcccccacccgcgctttgttaggtctacctctctaaatctctgccttcctcgcacagtaagtgacctctccatgacaaagggcccccagacagcagttataaatcaatgtgttttgggtttgtttgtttgtttgttttgttttaaagaaaaacccggccatgcttggtggcacttgcctttaatagtagcgcttggtagacagaggcaagcggttctctgtaagttcaaggccagcctggtctacacagtgagaccgggtctcaaaaacaaaacaacaaaaaacaactcctattgaatccactacaggaagggggggcgcggatcactgtctgcaaactaaagtgacttgagctcctgtcacagcctttccagcaagggcaagcttctttattagttat

SEQ ID NO: 424 - DNA, 1035 bp, Rat
cctgaggcgactacggtgcgggtgccgggtgccgggtgcctacagcccccatcagcttccccggggagattctgccgatttgtcacgagccatgctcaggaggcagctcgtctggtggcacctgctggctttgcttttcctcccattttgcctgtgtcaagatgaatacatggagtctccacaagctggaggactgcccccagactgcagcaagtgttgccatggagattatggattccgtggttaccaagggccccctggacccccaggtcctcctggcattccaggaaaccatggaaacaatggaaataacggagccactggccacgaaggggccaagggtgagaaaggagacaaaggcgacctggggcctcgaggggaacgggggcagcatggccccaaaggatagaagggatacccaggggtgccaccagagctgcagattgcgttcatggcttctctagcgactcacttcagcaatcagaacagtggcattatcttcagcagtgttgagaccaacattggaaacttcttcgatgtcatgactggtagatttggggcccccgtatcaggcgtgtatttcttcaccttcagcatgatgaagcatgaggacgtggaggaagtgtatgtgtaccttatgcacaatggtaacacggtgttcagcatgtacagctatgaaacaaagggaaaatcagatacatccagcaaccatgcagtgctgaagttggccaaaggagatgaagtctggctaagaatgggcaacggtgccctccatggggaccaccagcgcttctctaccttcgcaggctttctgctttttgaaactaagtgatgaggaagtcaggatagctccatgctaagggcgatttgtaggtgagctagggttgttaggatctgaggggtgttggagttgggcttctctatggagtatttaactgttacattggtcacactgctactcattctaatggcataccaattatgttggatactttaggggctaggaagaatagaccacaaggtaatattcccaga

SEQ ID NO: 425 - DNA, 835 bp, Rat
gtgccctccgccgggtcgggatggagctgcctgccgtgaacttgaagttattctcctggttcactggctgttgacaacctggggctgcttggcgttctcaggctcctatgcttggggcaacttcactatcctggccctgggtgctgtgggctgtggcccagcgggactctgttgatgccattggcatgtttcttggtggcttggttgccaccatcttcctggacattatctacattagcatcttctactcaagcgttgccgttggggacactggccgcttcagtgccggcatggccatcttcagcttgctgctgcaagcccttctcctgctgcctcgtctaccacatgcaccgggcagcgagggggtgagctcccgctccgctcggatttcttcggaccttctcaggaacatagtgcctaccagacaattgactcgtcagactcacctgcagacccccttgcaagcctggagaacaagggccaagctgccccccgggggtactgaagctgtccctggccgtcctggggcccagcaggatgcttgtcaccttctttactggacctacaatggggtatcctccattccctgccacagaggtggcctgagtcatgtgccctcggaggtcccagctgagaagagcccagtcctaattctccatgctgcccctccattcaagacacctgttaacccctgggctagaactgtggttggtttcttcccctcctccccatcactataacacacaaccgccgagctgtgcagagtgttcagggccatccaggccttatgggccaatgatcactgcctctcaggctaccccaaggtgacccagcc

SEQ ID NO: 426 - DNA, 1337 bp, Mouse
  misc_feature (1)...(1337): n = A,T,C or G
accggcctcactatgtctgccattttcaattttcagagtctgttgactgtaatcttgctgcttatatgtacatgtgcttatatccgatccctggcacccagcatcctggacagaaataaaactggactattgggaatattttggaagtgtgcccgaattggggaacgcaagagtccttatgtcgccatatgctgtatagtgatggccttcagcatcctcttcatacagtagctttggaaactaccagcatgtgcttgctatcagactgtaaacaaggacttgcctccagaaaataatgggaagaatggttaagccatttgtctctgaacatggaatgagataaacttcaagatgctgttctctatttttatgctattggaccaatgagctgaatgaataattaagatgtaacagttcaatacacaggaatgtgattgtatccatcaacctcagttctctcactccagtattacattctgcaaatgtcattctgttgtgtcaggactgcttttcataaggttcttcgggcacgaagtagaaacccagtggcaaattccaaggctcctttgactagggcttcaaaataatgtcttcacagaatggtacctctagcgactgtcctattnttattgagaaaaaaacttgttctatttttgttgttgttactgttcttatggattgcattcatatttaaaccctttggattgctaaccagagtacctctattcttggcaaattccgcagtttattacaggtgtttaaagtattttaaacaaaactctgaatttctttagttagcctaagagttggcttctagtcacaaagatacagctgccacactgtgacgaagagcaccttagaaagaaaagcagcaagtgagcggtgagcaagtaagcaccgtgcagtcttcgtgcaagtaagcaccgtgcagtcttcgttctctgtagtcttgtcttccaaatagaacgtccatcgtagttacccaaaggtggtatttgtggtgttcttaatgcagtgctttaagtctagtgtatgttctgtcagcttgaactggaatctctcttgtaactttgtaggttataaacatatctcatatctgctttagtctgggtactatgctctaagtacatttcagctttgacacagaatgtgaatagacgaatatcaaaggatacttacaagtttgtatccaacatttcttcaggttcagctgaaaatcagttactgtttcaaaacaaagaggaattaaatcctagctgaaaactatacatagcatttattaattaattactgggtttaactgctctttttaaaagtttgaaaaaaaaaaaaaaaaa

SEQ ID NO: 427 - DNA, 780 bp, Mouse
gctagtcgaatgtccgggctgcggacgctgctggggctggggctgctggttgcgggctcgcgcctgccacgggtcatcagccagcagagtgtgtgtcgtgcaaggcccatctggtggggaacacagcgccggggctcggagaccatggcgggcgctgcggtgaagtacttaagtcaggaggaggctcaggccgtggaccaagagctttttaacgagtatcagttcagcgtggatcaactcatggagctggccgggttgagctgtgccacggctattgccaaggcttatccccccacgtctatgtccaagagtcccccgactgtcttggtcatctgtggccccggaaataacggaggggatgggctggtctgtgcgcgacacctcaaactttttggttaccagccaactatctattaccccaaaagacctaacaagcccctcttcactgggctagtgactcagtgtcagaaaatggacattcctttccttggtgaaatgcccccagaggatgggatgtagagaagggaaaccctagcggaatccaaccagacttactcatctcactgacggcacccaagaagtctgcaactcactttactggccgatatcattaccttgggggtcgctttgtaccacctgctctagagaagaagtaccagctgaacctgccatcttaccctgacacagagtgtgtctaccgtctacagtaagggaggtgggtaggcaggattctcaataaagacttggtactttctgtcttgaaaaaaaaaaaaaaaaaaa

SEQ ID NO: 428 - DNA, 460 bp, Mouse
aatcatggcgccgtcgctgtggaaggggcttgtaggtgtcgggctttttgccctagcccacgctgccttttcagctgcgcagcatcgttcttatatgcgactaacagaaaaggaagatgaatcattaccaatagatatagttcttcagacacttctggcctttgcagttacctgttatggcatagttcatatcgcaggggagttcaaagacatggatgccacttcagaattaaagaataagacatttgataccttaaggaatcacccatctttttatgtgtttaaccatcgtggtcgagtgctgttccggccttcagatgcaacaaattcttcaaacctagatgcattgtcctctaatacatcgttgaagttacgaaagtttgactcactgcgccgttaagctttttacaaattaaataacaggacagacacagaattgagtattggagtttggggtgta

SEQ ID NO: 429 - DNA, 472 bp, Mouse
gaagcctcttcccatggaagcacactctaggagagagaaggcctctgggctccgcctggcctggcattatgaatgcagtggggtcagtgtgtggtggatgtgtgtactgggttggctttcctttttagtttttttactttttagtttagtttgttcttttccttccccaataaatcattctcacatgcttccatgtttgtttctgagaggtgggggctcaaatgtatagaaagtaggccccagtccataaggaggtgtgaacacacccccttactgcttatcacccatttgacaggaacgcccaggaggggagggggaggggaagaggtgagttctgcacagtcggacatttctgttgcttttgcatgtttaatatagacgttcctgtcgatccttgggagatcatggccttcagatatgcacacgacctttgaattgtgcctactaattatagcaggggacttgggtaccc

SEQ ID NO: 430 - DNA, 954 bp, Mouse
attagcggctcctcagcccagcaaatcctccactcatcatgcttcctcctgccattcatctctctctcattcccctgctctgcatcctgatgagaaactgtttggcttttaaaaatgatgccacagaaatcctttattcacatgtggttaaacctgtcccggcacaccccagcagcaacagcaccctgaatcaagccaggaatggaggcaggcatttcagtagcactggactggatcgaaacagtcgagttcaagtgggctgcagggaactgcggtccaccaaatacatttcggacggccagtgcaccagcatcagccctctgaaggagctggtgtgcgcgggcgagtgcttgcccctgccggtgcttcccaactggatcggaggaggctacggaacaaagtactggagccggaggagctctcaggagtggcggtgtgtcaacgacaagacgcgcacccagaggatccagctgcagtgtcaggacggcagcacgcgcacctacaaaatcaccgtggtcacggcgtgcaagtgcaagaggtacacccgtcagcacaacgagtccagccacaactttgaaagcgtgtcgccagccaagcccgcccagcaccacagagagcggaagagagccagcaaatccagcaagcacagtctgagctagacctggactgactaggaagcatctgctacccagatttgattgcttggaagactctctctcgagcctgccattgctctttcctcacttgaaagtatatgctttctgctttgatcaagcccagcaggctgtccttctctgggactagcttttcctttgcaagtgtctcaagatgtaatgagtggtttgcagtgaaagccaggcatcctgtagtttccatcccctcccccatcccagtcatttctttaaaagcacctgatgctgcattctgttacagtttaaaaaaaaaaaaaaaaaa

SEQ ID NO: 431 - DNA, 780 bp, Mouse; identical to SEQ ID NO: 427

SEQ ID NO: 432 - DNA, 1144 bp, Mouse
cttctcagggcctgccacccaaataagtctggccctagcctcaactctctctcaggctgggccacaggaagctgctgactggccacttgacaccctccccctaaagctaatgtctgtgactatagggaggttagcactttttctaattggaattcttctctgtcctgtggccccatccctcacccgctcttggcctggaccagatacatgcagcctctttctccagcacagcctttccctgagcctgaggttagggcagagtttagagggtgggctaagtgtatgttttcatgtatgcattcatgcctgtgagtgtgtggcttgctgtcgtgtcctctgggatcccaagccacgcgggtcttccctctgtagatgggtcctgggttctatcacctgcttatttatgtacgaggttggggggtggacccagggtgggttgattgtctctttgtaaggaagtatgtgtcgggggtgacacgaggctaagcccgagaaaccccgggagacagcactgcataagaaactggtttccmagactgcagagggagctgcacttttgttttgaccaaaaacaaaaaacaaaacaaaacaaaaacaaaacaaaaataactctgaagggcgggaggatacccaagcctgatgcctgagaggagtccctagacttcagcaactccgctgcgtggcctgagcccagcgggagggatggggagagaattttttggagtccgtgcctgtggtgggcagtcctgagccttcagctgaagcagtgctttttggctgccctcacctcgcactacttgaccttgaggctctgagtatctcctgtgcacaggagaagctcctgcaccagaaagcaccaaarsccmtggcaccccatcttactccactctccccagggactcccaggtgggaactgctgtggcagtgagctcagcccggacagacactgccaaccctgtctcctggcattgggctccggctctacctccccaagcagggcgaggccccgccttctcagcctagcaccacctgtccccgagtcttctcagcttgcccatcattctcggcgcccacacaggtgacagtcccaagtagataacctccatgggacaagttgggtgttgccttacccgcctgcccagcc

SEQ ID NO: 433 - DNA, 438 bp, Mouse
cttgagtctggagtgctgcaaataatagtatgcactatccctgcctggcatgtttgtttgttaatgtgcactggtgttttgcctggatgtgtatacttgtgaagatgtcagaactcctggagctggagttagagacaatggtgagctgccttgtggatgttgggaattgaacccaggtcctctggagaaataaccagtgctcttaaccactaagccatctcaacagccccaaattatttttttaataagttgcctcggtcatgttgtcttaatcagagcgatagaaaagtaactaatatagattatttatgaattcaggtggcttaatggtatatgcatgaattagtagtaaaacaagaactagggccagcaagtggcttaagggtgcctgctaaccatctcagccacctgagttcagtctccaggaaccacacagtg

SEQ ID NO: 434 - DNA, 383 bp, Mouse
cccacgtctatgttcaccttcgttgttctggtaatcaccatcgtcatctgtctctgccacgtctgctttggacacttcaaatacctcagtgcccacaactacaagattgaacacacagagacagatgccgtgagctccagaagtaatggacggccccccactgctggcgctgtccccaaatctgcgaaatacatcgctcaggtgctgcaggactcagagggggacggggacggagatggggctcctgggagctcaggcgatgagcccccatcgtcctcctcccaagacgaggagttgctgatgcctcctgatggcctcacggacacagacttccagtcatgcgaggacagcctcatagagaatgagattcaccagtaaggggt

SEQ ID NO: 435 - DNA, 405 bp, Rat
  misc_feature (1)...(405): n = A,T,C or G
ctcgtgccgaattcggcacgagtggcgagatggggatgcgccctggagccgactgggctgcggtctgcgctttgtggccttcctggcgaccgagctgctccctcccttccagcnggcgaattcagcccgacgagctgtggctttaccggaacccgtacgtgaaggcggaatacttccccaccggccccatgtttgtcattgcctttctcaccccactgtccctgatcttcttcgccaagtttctgaggaaagctgacgccgaccgacagcgagcaagcctgcctcgctgccagccttgccctagcgctaaatggtgtctttaccaacatcataagactgatagtgngcaaggncacgcccaaattgcttctaccgagtgttccccgnncgggattgcccattctt

SEQ ID NO: 436 - DNA, 151 bp, Rat
atactgcctgtagagttagtatttctgttttatatatgttgcacactgaattgaagaaatgttggtttttcttgttttgttttagtttgtttctttggttttgtttttggttttgctttttacttcccaggtttgactatttgccaatgcc

SEQ ID NO: 437 - DNA, 1715 bp, Mouse
cagaatatggctctgggggttctgatagcagtctgcctcttgttcaaagcaatgaaggcagcactgagcgaagaagcagaggtgatccctcctagcacagcacagcagagcaactggacatttaacaacaccgaagctgactacatagaagaacctgtagctctgaagttctctcatccttgtctggaagaccataatagttactgcattaatggagcatgtgcattccaccatgagctgaagcaagccatttgcagatgctttactggttatacgggacaacgatgtgagcatttgaccctaacttcgtatgctgtggattcttatgaaaaatacattgcgattgggattggcgtcggattgctaattagtgcttttcttgctgtcttctattgctacataagaaaaaggtgtataaatctgaaatcaccctacatcatctgctctggagggagcccattgtgagaccttataagacatagtcatcaagccatttgtcaaaagccacagggaatccaatggagatctttggatgatacaaaatgtgataagctaacttgaaaataatggtggtttgggtcacaatgcagtaactgaccattggttcttagctttggtcatcgttgggtgccatggaagctatgggaatgagctacagtaacagaagccaagttcactacccttctttgggtttgctgttgggtggttgttgtcactgcaggaagatttgttctatacttctgaccatctcagatgtgaattttcattttaattgttttctactacacatcaatcaagtccaagtaatgccatttccgggttcttcgggcactcaacattttgggccacccgcctcgatggacctaatagcaaagtatctgtccttatggaatttcagggaatttggtatcaatttttagatgaaaacagtgaatgtctcagctccttgagtgaaccaaagatgcattacacctaaaccactaaaagaaaatggaatatccaaggcagcataaatcctacccagctggtgacaacagtttgcaaacttcattcatgtagtttggaagaagcagataaattcctgaggactgaaagtcacctggacagcagatccagagcaggcaaaggtagctggttcctatatcgaccataaagcctgtgtgggctcatctgtcccctgatgtttttgcctatcatctcagccttacattggaagactcacacttggtatccatcgcttgaactgaagttcgacaattcacctaatgactaaaagcttacaattgttcccaaaatatataggaacaacagcatgtggaatgtaaccattttttgacgtgttgatagcatatttgcacatgggttaaaaaaagaaacagtcgtagaaatacttattagggaatcagtatccctccttggaattgcttctgctacatgattcaatcttgggcaagtctcttatattctttgtggtttggttccattctctacaagacccatgcagttccaaaattgaactctaatagaactaaaaaatacctcctataactgcatggcaggcaagattatcctcaatgcttccatcctcagccccgtttctaaccctcaaatacccacgaatattatccttactatatattgtcatgttcagtttgtaaaataataacttattttgaaaagaaataaaaaatgaaattacaaagcaaaaaaaaaaa

SEQ ID NO: 438 - DNA, 1627 bp, Mouse
cgggagcctgctactgccctgctgggttccttggggccgactgtagccttgcctgtccacagggtcgcttcggccccagctgtgcccacgtgtgtacatgcgggcaaggggcggcatgtgacccagtgtcggggacttgcatctgtcctcccgggaagacgggaggccattgtgagcgcggctgtccccaggaccggtttggcaagggctgtgaacacaagtgtgcctgcaggaatgggggcctgtgtcatgctaccaatggcagctgctcctgccccctgggctggatggggccacactgtgagcacgcctgccctgctgggcgctatggtgctgcctgcctcctggagtgttcctgtcagaacaatggcagctgtgagcccacctccggcgcttgcctctgtggccctggcttctatggtcaagcttgtgaagacacctgccctgccggcttccatggatctggttgccagagagtttgcgagtgtcaacagggcgctccctgtgaccctgtcagtggccggtgcctctgccctgctggcttccgtggccagttctgcgagagggggtgcaagccaggcttttttggagatggctgcctgcagcagtgtaactgccccacgggtgtgccctgtgatcccatcagcggcctctgcctttgcccaccagggcgcgcaggaaccacatgtgacctagattgcagaagaggccgctttgggccgggctgtgccctgcgctgtgattgtgggggtggggctgactgcgaccccatcagtgggcagtgccactgtgtggacagctacacgggacccacttgccgggaagtgcccacacagctgtcctctatcagaccagcaccccagcactccagcagcaaggccatgaagcactaactcagaggaacgcccacagaggcccactactgtgttccagcccaagggacccaggcctctgctggtgactaagatagaggtggcacttttggatccacacctcttctggaaagccatggattgctgtggacagctatggatagtcatatagccacacacccgggctccatggtcatggggaagaaggcctcctttggacacaaggaatccaggaagtcggctgggcttcgggccactgtttacatggggaccctgcaggctgtgctgtggaatcctggccctcttcagcgacctgggatgggaccaaggtgggaatagacaaggccccacctgcctgccaggtccttctggtgctaggccatggactgctgcagccagccaactgtttacctggaaatgtagtccagaccatatttatataaggtatttatgggcatctccacctgccgttatggtcctgggtcagatggaagctgcctgaccccagaacttaggcagtggcctgtggggtctccagcaagtgggatcaagggttttgtaaaacccagtgagttaaaggcacagtggtgtccccattgcctgggtttctgtgctttctgtagactccgtgggtccttccaagagcaggtggcctgagggttcttgaatgggaacctcctgtacccctctgtaatgacatgcatgtaatgtaatgcttcagtcaccttagggttcttcctgacttccagctctag

SEQ ID NO: 439 - DNA, 2401 bp, Mouse
agtgggtacaccttactacatgtctccagagagaatacatgaaaatggatacaacttcaagtctgacatctggtctcttggctgtctgctatatgagatggctgcactgcagagtcctttctacggcgacaagatgaacttgtattctctgtgtaagaagatagagcagtgtgactacccgcctctcccgtcagatcactattcggaggagctacgacagctagttaatatatgcatcaacccagatccagagaagcgacccgacatcgcctatgtttatgatgtggcaaagaggatgcatgcatgtaccgcaagcacctaaactgtacaagatcctgaagacggcaaccaagataacttaaaagtgtttttgtgcagatcatacctccccgcttatgtctgggtgttaagattactgtctcagagctaatgcgctttgaatccttaaccagttttcatatgagcttcatttttctaccaggctcaatcaccttcccaatccacaactttgggatgctcagatggcaccaagaatgcaagcccaacaagagtttttcgtttgagaattgtttcgagtttctgctgatagactgtgtttatagatagtcagtgcccgatggtgaagcacacacacataggcacatgtccagagcgatgcagaacctgaggaaggacctgggcatttgacttgtttgcttttaagtcacttaatggacgttgtagtggacatgattgtgaacttctgatttttttcttttaagtttcaagtacatgttttagttcttagcattagagatctcaaatataattcttataagacatgcagacataaactttttgagaaagatttaaaatttttagtttatacattcaaaatgcaactattaaatgtgaaagcatagaggtcaaaatgtgagttggacactgaagtctatgttttaatgcctttgaaagcctttttttgtgtgtgtttaaatggtataaatgaacccattttaaaacgtggttaaggacttgtttgcctggcgtgatagtcatgtttaacatgcacaaggctttgtgtttttattgtacatttgaagaatattcttggaataatcttgcagtagttatagttcaatttctttacaaatctaaatacacttaactcataactatacactgtaatgcaagcatatattgttattcatatattgaagttttgatcagttcctcttcagaatcttttttatccaagttactttcttatttatattgtgtgtgcatttcatccattaaatgtttcagattttctgagaatgagttccctttttaaaatatatttggtatgccaacacttttttaggattgaaaaaaaatttttttaaatgtttgggtcattctaggtgcatctgttttctcttgttagaaagaaaaggtgtgtgttaaaatgtgcctgtgaatgtcgatattgtttggcagggttataattttagagtatgctctagagtatgttgaacagcgtgaagactggcccttactgaagacagaactgttccaagagcagcattcccgttgagatgctttggagtaaagtactgtgtatgacgatgacagacattttagttaagggggtgaaaaaaaaaggaggggtatttaggaaaccctgaggtggaattttggtgaatgtcttcatcttaataccagccaattccttcagagaattgtggagccaaagaacagagtaatcgtggctgttgcagaacacggtgtgccatggtagagcattgggaaggctcatcctgccggtgggtcggtcagacagccctgtgttggggagcttgtactctggcccacagagctcggttgattttcttacagagtattctttctacagttattttcaagtaattgtaaattttcaaagtaatatctcatcttttaattcactatgtatgctgtcgtagacaaaggaaatctgggtttttttttgtttttgtttttgtttttttttgtcttgaaggctgaactgggtacatcccagatcttagtggctcataggatatacccagaggcatgaagaaatggcttccggtgaccatttgtgttgkgktatatcccattgtaatgtcacaggactgattgagatgaaacatccccttcctacaagagttgttttctttccatatttaaaaacatgaggttctgcctggcagtgatggtacacacctttaatcccagcacccgggaggcagaggcaggaggatttctgagttcgaggccagcctggtctacaaagtgagttccaggacagccaggactacacagagaaatcctgtctcaaaaaaccaaaactaaatgaaaatacaaggcttctccccttgtagtgactttgctttatgaatttgtctcaaaaaaaaaa

SEQ ID NO: 440 - DNA, 1379 bp, Mouse
asaacagcaaagcagagctggctgcagccattcactggcctcgggcgggcgtgccacagaggcagttgaagtgaaagtgaaagagaaacgataagagaacggagaccacaggtgctaagtgagggtgctcacagaaccccctcttcagccagagatcactagcaggggaactgtggagaaggcagccagcaaggaagagcctgagagtagcctccatgggcttggagcccagctggtatctgctgctctgtttggctgtctctggggcagcagggactgaccctcccacagcgcccaccacagcagaaagacagcggcagcccacggacatcatcttagactgcttcttggtgacagaagacaggcaccgcggggcttttgccagcagtggggacagggagagggccttgcttgtgctgaagcaggtaccagtgctggatgatggctccctggaaggcatcacagatttccaggggagcactgagaccaaacaggattcacctgttatctttgaggcctcagtggacttggtacagattccccaggcagaggcgttgctccatgctgactgcagcgggaaggcagtgacctgcgagatctccaagtatttcctccaggccagacaagaggccacttttgagaaagcacattggttcatcagcaacatgcaggtttctagaggtggccccagtgtctccatggtgatgaagactctaagagatgctgaagttggagctgtccggcaccctacactgaacctacctctgagtgcccagggcacagtgaagactcaagtggagttccaggtgacatcagagacccaaaccctgaaccacctgctggggtcctctgtctccctgcactgcagtttctccatggcaccagacctggacctcactggcgtggagtggcggctgcagcataaaggcagcggccagctggtgtacagctggaagacagggcaggggcaggccaagcgcaagggcgctacactggagcctgaggagctactcagggctggaaacgcctctctcaccttacccaacctcactctaaaggatgaggggacctacatctgccagatctccacctctctgtatcaagctcaacagatcatgccacttaacatcctggctccccccaaagtacaactgcacttggcaaacaaggatcctctgccttccctcgtctgcagcattgccggctactatcctctggatgtgggagtgacgtggattcgagaggagctgggtggaattccagcccaagtctctggtgcctccttctccagcctcaggcagagcacgatgggaacctacagcatttcttccacggtgatggctgacccaggccccacaggtgccacttatacctgccaa

SEQ ID NO: 441 - DNA, 1214 bp, Rat
gccatggctggttgggcgggggccgagctctcggtcctgaacccgctgcgtgcgctgtggctgttgctggccgccgccttcctgctcgcactgctgctgcagctggcgcccgccaggctgctaccgagctgcgcgctcttccaggacctcatccgctacgggaagaccaagcagtccggctcgcggcgccccgccgtctgcagggccttcgacgtccccaagaggtacttttctcacttctacgtcgtctcagtgttatggaatggctccctgctctggttcctgtctcagtctctgttcctgggagcgccgtttccaagctggctttgggctttgctcagaactcttggggtcacgcagttccaagccctggggatggagtccaaggcttctcggatacaagcaggcgagctggctctgtctaccttcttagtgttggtgttcctctgggtccatagtcttcggagactcttcgagtgcttctacgtcagcgtcttctctaacacggccattcacgtcgtgcagtactgtttcgggctggtctactatgtccttgttggcctgaccgtactgagccaagtgcccatgaatgacaagaacgtgtacgctctggggaagaatctactgctacaagctcggtggttccacatcttgggaatgatgatgttcttctggtcctctgcccatcagtataagtgccacgtcattctcagcaatctcaggagaaataagaaaggtgtggtcatccactgccagcacagaatcccctttggagactggttcgagtatgtgtcttctgctaactacctagcagagctgatgatctacatctccatggctgtcaccttcgggctccacaacgtaacctggtggctggtggtgacctatgtcttcttcagccaagccttgtctgcgttcttcaaccacaggttctacaaaagcacatttgtgtcctacccaaagcataggaaagctttcctcccgttcttgttttgaacaggctttatggtgaagagcgcagcccaggtgacaggttcccttcctcgagacgctgagacaggctgaagtacactttctgcagctggcgcccgccaggctgctaccgagctgcgcgctcttccaggacctcatccgctacgggaagaccaagcagtccggctcgcggcgccccgccgtctgcagcccgggggatccactagttctagagcgccgcc

SEQ ID NO: 442 - DNA, 1977 bp, Rat
aaaataaccaaccaaacaaactttcctcttcccgctagaaaaaacaaattctttaaggatggagctgctctactggtgtttgctgtgcctcctgttaccactcacctccaggacccagaagctgcccaccagagatgaggaactttttcagatgcagatccgggataaggcattgtttcacgattcatccgtgattccagatggagctgaaatcagcagttacctatttagagatacacctagaaggtatttcttcatggttgaggaagataacaccccactgtcagtcacagtgacaccttgtgatgcgcctttggaatggaagcttagcctccaggagctgcctgaggagtccagtgcagatgggtcaggtgacccagaaccacttgaccagcagaagcagcagatgactgatgtggagggcacagaactgttctcctacaagggcaatgatgtagagtattttctgtcttcaagttccccatctggtttgtatcagttggagcttctttcaacagagaaagacacacatttcaaagtatatgccaccaccactccagaatctgatcaaccataccctgacttaccatatgaccccagagttgatgtgacctctattggacgtaccacagtcactttggcctggaagcaaagccccacagcttctatgctgaaacaacccatagagtactgtgtggtcatcaacaaggagcacaatttcaaaagcctttgtgcagcagaaacaaaaatgagtgcagatgatgccttcatggtggcgcccaaacctggcctagactttagcccctttgactttgcccatttcggatttccaacagataatttgggtaaggatcgcagcttcctggcaaagccttctcccaaagtggggcgccatgtctactggaggcctaaggttgacataaaaaaaatctgcataggaagtaaaaatattttcacagtctccgacctgaagcccaatacccagtactactttgatgtcttcatggtcaataccaacactaacatgaacacagcttttgtgggtgcctttgccaggaccaaggaggaggcaaaacagaagacagtggagctcaaagatgggagggtcacagatgtggtcgttaaaaggaaagggaaaaagtttctacggtttgctccagtctcctctcaccaaaaagtcaccctctttattcactcttgtatggacactgttcaagtccaagtgagaagagatgggaagctgcttctgtcacagaatgtggaaggcattcggcagttccagttaagaggaaaacccaaaggaaagtacctcattcgactgaaaggcaacaagaaaggagcatcaatgttgaaaatactagccaccaccaggcccagtaagcacgcattcccctctcttcctgatgacacaagaatcaaagcctttgacaagctacgcacttgctcttcagtcacggtggcttggcttggcacccaagagaggagaaagttttgtatctacagaaaggaagtgggtggaaactacagtgaagagcagaagagaagagagagaaaccagtgcctaggaccagacaccagaaagaagtcagagaaggttctttgcaagtacttccacagccaaaacctgcagaaagcagtgacgacagagacaatcagagatctgcaacctggcaagtcttacctactggacgtttatgttgtaggacatgggggacactctgtgaagtatcagagtaaacttgtgaaaacaaggaaggtctgttagttaccttaagtgaagatcagtagaactcccggagagatatggaatcacactgcctgttactgactactctcatgacaaacagaagttgtacttgaaagaaaggataacaacatgtgtacattgatgcctgtgtaatgtaacgtggagacttgtattcacgcacacctgtggtacttagggtccatctgtctaatgctggctaatgtcaaagg

SEQ ID NO: 443 - DNA, 1744 bp, Rat
ctgacatgaagccccctagacccagagattggttcctgctgtgacatgcctaccatgtggccacttcttcatgtcctctggcttgctctggtctgtggctctgttcacaccaccctgtcaaagtcagatgccaaaaaagctgcctcaaagacgctgctggaaaagactcagttttcggataaacctgtccaagaccggggtctggtggtgacggacatcaaagctgaggatgtggttcttgaacatcgtagctactgctcagcaagggctcgggagagaaactttgctggagaggtcctaggctatgtcactccatggaacagccatggctatgatgttgccaaggtctttgggagcaagttcacacagatctcaccagtctggttgcagctgaagagacgtggtcgggagatgtttgaaatcacaggcctccatgatgtggaccaagggtggatgcgagctgtcaagaagcatgccaaaggcgtgcgcatagtgcctcggcttctgtttgaagactggacttacgatgatttccgaagcgtcctagacagtgaggatgagatagaagagctcagcaagactgtggtacaggtggcaaagaaccagcattttgacggctttgtggtggaggtctggagccagttgctgagccagaaacatgtaggcctcattcacatgcttactcacttggctgaggcgctgcaccaggccaggctgctggtcattctggtcatcccacctgctgtcacccctgggactgaccagctgggcatgtttacacacaaggagtttgagcagctggcccccatactagatggcttcagcctcatgacatacgactactccacatcacagcagcctggccctaatgctccattgtcatggatccgagcctgtgttcaggtcctagaccccaagtcacagtggcgtagcaagatcctcctgggattgaacttctatggcatggattatgcagcctccaaggatgcccgtgagcctgtcattggagccagggcagttttgaaggtggctctgccattggctgtctcatcccagcagatctggacattgggaagaggagggtccaccagtgccctactcctggcaggcttggggctggcctcagagccctgtacaaagagcgaggaggttccaaagaagagcctcttagatacagtttggcactggcagggagagccaggagcactgtgtagaggtcgtcttcacacctggatcctagtgagcgcggtcccgcaggcctgcacatgcctgtttcagtgatggcctcacgaggcagcaccggctctagctgcactgctttctttgattagctttggccatgggagacacaggtagcagcatagcgggtcaggaacctcttgagcagatccaaccaaaggctttttgtcacttgccagctctgcatggtcagcctgtgacaccgtctcactcaaggccttctggagttggccctcagctcagatgtcatgtgagggataccctaaggagatgatggggctccctcttgcctgagcttgcaggattggatcttgggcagatcagggcagtggaaacgtcagaccttctacccgtacatacagacgctgaaggaccacaggccccgtgtggtatgggacagccaggctgcggaacacttctttgagtacaagaagaatcgcggcgggaggcacgttgtcttctacccaacgctgaagtctctgcaggtgcggctggagctagccag

SEQ ID NO: 444 - DNA, 2157 bp, Mouse
cctgctgccctcttgcagacaggaaagacatggtctctgcgcccggatcctacagaagctcatggggagccccagactggcagccttgctcctgtctctcccgctactgctcatcggcctcgctgtgtctgctcgggttgcctgcccctgcctgcggagttggaccagccactgtctcctggcctaccgtgtggataaacgttttgctggccttcagtggggctggttccctctcttggtgaggaaatctaaaagtcctcctaaatttgaagactattggaggcacaggacaccagcatccttccagaggaagctgctaggcagcccttccctgtctgaggaaagccatcgaatttccatcccctcctcagccatctcccacagaggccaacgcaccaaaagggcccagccttcagctgcagaaggaagagaacatctccctgaagcagggtcacaaaagtgtggaggacctgaattctcctttgatttgctgcccgaggtgcaggctgttcgggtgactattcctgcaggccccaaggccagtgtgcgcctttgttatcagtgggcactggaatgtgaagacttgagtagcccttttgatacccagaaaattgtgtctggaggccacactgtagacctgccttatgaattccttctgccctgcatgtgcatagaggcctcctacctgcaagaggacactgtgaggcgcaaaaagtgtcccttccagagctggcctgaagcttatggctcagacttctggcagtcaatacgcttcactgactacagccagcacaatcagatggtcatggctctgacactccgctgcccactgaaactggaggcctccctctgctggaggcaggacccactcacaccctgcgaaacccttcccaacgccacagcacaggagtcagaaggatggtatatcctggagaatgtggacttgcacccccagctctgctttaagttctcatttgaaaacagcagccacgttgaatgtccccaccagagtggctctctcccatcctggactgtgagcatggatacccaggcccagcagctgacgcttcacttttcttcgaggacatatgccaccttcagtgctgcctggagtgacccaggtttggggccggatacccccatgcctcctgtgtacagcatcagccagacccagggctcagtcccagtgacgctagacctcatcatccccttcctgaggcaggagaattgcatcctggtgtggaggtcagatgtccattttgcctggaagcacgtcttgtgtcctgatgacgccccttaccctactcagctgttgctccggtccctaggctccggtcgaacaaggccagttttactcctacatgcagcggactcagaggcacagcgacgcctggtgggagctttggccgaactgctgcggacggcgctgggaggtggacgcgacgtgatcgtggatctctgggaagggacgcacgtagcacgcattggaccactgccgtggctttgggcagcgcgggagcgcgtggcgcgggagcagggcacagtgctgctcctgtggaactgtgcgggtcccagcaccgcctgcagcggtgacccgcaggctgcgtcccttcgcaccttgttgtgcgctgctccacgtccgctgctgctcgcctacttcagtcgcctctgcgccaaaggtgacatcccccggccgctgcgcgctctgccacgctaccgcctgcttcgtgacctgccgcgcctgctgagagcactggatgctcagcctgccaccctagcctccagctggagtcaccttggggctaagcggtgcttgaaaaaccgtctggagcagtgtcacctgctggaacttgaggctgccaaagatgactaccaaggctcaaccaatagtccctgtggtttcagctgtctgtagcctcagcctgtgtagcaacagcaggaactccagaatgaggcctcacacatgtactctttgggggtgcttcttgtcccccaaaccgtaagactcaccttaagtcccacacttgaccaacctccctcacatttgctccctcttagagttcctgagaggaacttgggctttcctgataggtcctcagccctttctgagaaggagggacgatttttccatttcttttcaaaactgaaaaaaaaaaa

SEQ ID NO: 445 - DNA, 2250 bp, Mouse
  misc_feature (1)...(2250): n = A,T,C or G
aaaagagactccacccactccagtagaccggggactaaaacagaaattctgagaaagcagcaagaagcagaagaaatagctatttcacagcagtaacagaagctacctgctataataaagacctcaacactgctgaccatgatcagcccagcctggagcctcttcctcatcgggactaaaattgggctgttcttccaagtggcacctctgtcagttgtggctaaatcctgtccatctgtatgtcgctgtgacgcaggcttcatttactgtaacgatcgctctctgacatccattccagtgggaattccggaggatgctacaacactctaccttcagaacaaccaaataaacaatgttgggattccttccgatttgaagaacttgctgaaagtacaaagaatatacctataccacaacagtttagatgaattccctaccaaccttccaaagtatgtcaaagagttacatttgcaagagaataacataaggactatcacctatgattcactttcgaaaattccgtatctggaagagttacacttggatgataactcagtctcggctgttagcatcgaagagggagcatttcgagacagtaactatctgcggctgctttttctgtcccgtaaccaccttagcacaatcccggggggcttgcccaggactattgaggaattacgcctggatgacaatcgcatatcaacgatctcttccccatcacttcatggtctcacaagcctgaaacgcctggttttagatggaaacttgttgaacaaccatggtttgggtgacaaagttttcttcaacttagtaaacttaacagagctgtccctggtgaggaattccttgacagcagcgccagtgaaccttcccggcacaagcctgaggaagctttaccttcaagacaaccatatcaaccgggtacccccaaatgctttttcttatttaaggcagctgtatcgactcgatatgtctaataataacctaagcaatttacctcagggtatctttgatgatttggacaatataacccaactgattcttcgcaacaatccttggtattgtggatgcaagatgaaatgggtacgagactggttacagtcgctaccggtgaaggtcaatgtgcgtgggctcatgtgccaagccccagaaaaggtccgtggaatggctatcaaggacctcagtgcagaactgtttgattgtaaagacagtgggattgtgagcaccattcagataaccactgcaatacccaacacagcatatcctgctcaaggacagtggccagctcctgtgaccaaacaaccagatattaaaaaccccaagctcattaaggatcagcgaactacaggcagcccctcacggaaaacaattttaattactgtgaaatctgtcacccctgacacaatccacatatcctggagacttgctctgcctatgactgctctgcgactcagctggcttaaactgggccatagcccagcctttggatctataacagaaacaatcgtaacaggagaacgcagtgaatacttggtcaccgccctagaacctgaatcaccctatagagtatgcatggttcccatggaaaccagtaacctttacctgtttgatgaaacacctgtttgtattgagacccaaactgcccctcttcgaatgtacaaccccacaaccaccctcaatcgagagcaagagaaagaaccttacaaaaatccaaatttacctttggctgccatcattggtggggctgtggccctggtaagcatcgccctccttgctttggtgtgttggtatgtgcataggaacgggtcactgttttcacggaactgtgcgtacagcaaagggcggaggagaaaggatgactatgcagaagccggtactaagaaagacaactccatcctggaaatcagggaaacttctttccagatgctaccgataagcaatgaacccatctccaaggaggagtttgtaatacacaccatatttcctccgaatgggatgaatctgtacaagaacaacctcagtgagagcagtagtaaccggagctacagagacagtggcatcccagactcggaccactcacactcatgatgcaaggaggtcccacaccagactgttccgggtttttttttaaaaaacctaagaaaggtgatggtaggaactctgttctactgcaaaacactggaaaagagactgagagaagcaatgtacntgtacatttgccatataatttatatttaagaactttttatt

SEQ ID NO: 446 - DNA, 1685 bp, Rat
  misc_feature (1)...(1685): n = A,T,C or G
gcggctcgggatggcggcccccatggaccggacccatggtggccgggcagcccgggcgctgcggcgggctctggcgctggcctcgctggccgggctattgctgagcggcctggcgggtgctctccccaccctcgggcccggctggcggcgccaaaaccccgagccgccggcctcccgcacccgctcgctgctgctggacgccgcttcgggccagctgcgcctggagtacggcttccaccccgatgcggtggcctgggctaacctcaccaacgccatccgcgagactgggtgggcctatctggacctgggcacaaatggcagctacaagtggatcccccgggctgcaggcctatgcagctggtgtggtggaggcctctgtgtccgaggagctcatctacatgcactggatgaacacggtggtcaattactgcggccccttcgagtacgaagtcggctactgtgagaagctcaagagcttcctggaggccaacctggagtggatgcagagggaaatggagcttagcccggactcgccatactggcaccaggtgcggctgaccctcgggctgcagctgaagaggcctggaggacagctatgaaggccgtttaaccttcccaactgggaggttcaacatcaaacccttggggttcctcctgctgcaggaatctctggagatctggaagacctagagacagccctgaataagaccaacgaccaagcgcttccgtgggctccggttcgtgctctgccctcatcaagctgctgcccggcagccatgatctcctggtggctcacaacacttggaactcctaccagaacatgttacgcatcatcatggagtcccccgggctgcagttccgggaggggccgcaagaaggagtaccccctgattgccggcaacaacttgattttttcgtcttacccgggcaccatcttctccggtgatgacttctacatcctgggcagtgggctggtcaccctggagaccaccaatcggcaacaaagaacccaagcgctgtggaagtacgtgcaaccccagggctgtgtgctggagtggattcgaaacattgtggccaacccgcctggccttggatggggccacctgggcagatgtcttcaggcggttcaatagtggcacgtataataaccagtggatgattgtggactacaaggcattcatccccaatgggcccagccctggaagccgggtgctcaccatcctagaacagatcccgggcatggtggtggtggcatcccccgggctgcaggaattcgatatcaagcttatcgatacacgtcgaaccctcgagccaagatcttccagagggaccagtcactagtagaggacgtagacaccatggtccggctcatgaggtacaatgacttccttcatgaccctctgtcgttgtgtgaggcctgcagcccgaagcccaacgcagagaacgccatctctgccccgctctgatctcaaccctgctaantggctcctacccatttcaggccctgcgtcagcgcgcccatggcggcattgatgtgaaggtgaccagcgttgcactggctaagtacatgagcatgctggcagccagtggccccacgtgggaccagttgccaccgttccagtggagtaaatcaccattccacaacatgctgcacatgggccaagcctgatctttggatgttctca

SEQ ID NO: 447 - DNA, 1890 bp, Rat
gcggaagcagccgcaggtatggcggctgccatgccgctgggtttatcgttgctgttgctggtgctagtggggcagggctgctgtggccgcgtggagggcccacgcgacagcctgcgagaggaactcgttatcactccgctgccttccggcgacgtggccgccacattccagttccgcacgcgttgggattccgatctgcagcgggaaggagtgtcccattacaggctcttccctaaagccctgggacagttgatctccaagtactctctgcgggagctacacctgtcattcacgcaaggcttttggaggacccgatactgggggccacccttcctgcaggctccatcaggtgcagagctctgggtctggttccaagacactgtcacagatgtggataagtcttggaaggagctcagtaatgtcctctcagggatcttctgcgcgtccctcaacttcatcgactccaccaataccgtcactcccacagcctccttcaaacctctggggctggccaatgacactgaccactacttcctgcgctatgctgtgctgccccgggaggtcgtctgcaccgagaatctcacgccgtggaagaagctcctgccctgtagctccaaggcagggctgtccgtgctactgaaagcagatcgattgttccacaccagttaccactcccaggcagtgcatatccggccaatctgcagaaatgctcactgcaccagtatctcctgggagctgaggcagaccctttcagttgtctttgatgccttcatcaccggacaggggaagaaagactggtctctcttccgcatgttctcccggactctcacagaggcctgtccattggcatctcagagcctagtttatgtggacatcacaggctacagccaggacaacgaaacactggaggtgagccctcccccaacttccacataccaggatgtcattttgggcaccaggaagacctatgccgtctatgacttgtttgacacagccatgatcaataactcccgaaacctcaacatccagctcaaatggaagagacccccagataatgaagccctgcccgtgcccttcctgcatgcacagcggtacgtgagtggttatgggctacagaagggcgagctgagcaccctgttgtacaactctcatccttaccgggccttccctgtgctgctactggatgctgtgccctggtacctgcggctgtatgtgcacaccctcaccatcacctccaagggcaaggataataaaccaagttatatccactaccagcctgcccaggaccggcagcagccccacctcctggagatgctcattcagctgccggccaactccgtcaccaaggtctccatccagtttgaacgagccctgctcaagtggacagaatacacgccagaccccaaccatggcttctatgtcagcccatctgtcctcagtgcccttgtgcccagcatggtggcagccaaaccagtggactgggaagagagccctctcttcaacaccttgttcccggtgtctgatggctccagctactttgtccgactctacacagagcccttgctagtgaacctgcccacccccgacttcagcatgccctacaatgtgatctgccttacatgcactgtggtggccgtgtgctatggctccttctacaatctcctcacccgaaccttccacattgaagagcccaaatccggcggcctggccaagcggctggctaacctcatccggcgtgctcgtggtgttccccctctctaagattccctttcttcagcaactacagcttcatactcacctgccccaggggagcagtggcagggctttttctgccatgccctctttccccagagttagcttctgaagctaactccccctggatctggtctg

SEQ ID NO: 448 - DNA, 1272 bp, Rat
cggcacgagcggccccgaagggggctgcacgggcgacttggcggcgatggctcgagctccggcggcgacgacggtggccggaggcggcggctcctcctccttctcctcctgggcttgggcccggcggtgatccgagctggcggccgcggccccccgatgagactgttggcgggctggctgtgcctgagcctggcgtccgtgtggctggcgcggaggatgtggacgctgcggagcccgctctcccgctctctgtacgtgaacatgactagcggccctggcgggccagcggcggccacgggcggcgggaaggacacgcaccagtggtatgtgtgcaacagagagaaattatgcgaatcacttcagtctgtctttgttcagagttatcttgaccaaggaacacagatcttcttaaacaacagcattgagaaatctggctggctatttatccaactctatcattcttttgtatcatctgtttttagcctgtttatgtctagaacatctattaacgggttgctaggaagaggctccatgtttgtgttctcaccagatcagtttcagagactgcttaaaattaatccggactggaaaacccatagacttcttgatttaggtgctggagatggagaagtcacgaaaatcatgagccctcattttgaagaaatttatgccactgaactttctgaaacaatgatctggcagctccagaagaagaaatacagagtgcttggtataaatgaatggcagaatacagggttccagtatgatgtcatcagctgcttaaatctgctggatcgctgtgatcagcctctgacattgttaaaagatatcagaagtgtcttggagcccacccaaggcagggtcatcctggccttggttttgccctttcatccctatgtggaaaacgtaggtggcaagtgggagaaaccatcagaaattctggaaatcaagggacagaattgggaagagcaagtgaatagcctgcctgaggtgttcaggaaagctggctttgtcatcgaagctttcactagactgccatacctgtgtgaaggtgacatgtacaatgactactatgttctggacgacgctgtctttgttctcagaccagtgtaaacatgtggaggcccaagtcttcagagtcacccctggaatctgccctccagaagaggaggtgcatccagtgatgtgagggggacctctggggactgtcattctcagtatcatgtaggaatttaaaaagccaaaatactaattctttctttgtagtgtgta

SEQ ID NO: 449 - DNA, 936 bp, Rat
gggccgccgagtcccgccgggtcggtgtagctcgctgccgacgctgcgacgctcgtgggtgccgtgttcggcttttcctgtctacttcagtgcaccgctgcagctccggcctcgggtctgacgcgccacagcatggcttccgctttggaggagttgcagaaagacctagaagaggtcaaagtgctgctggaaaagtccactaggaaaagactacgtgatactcttacaaatgaaaaatccaagattgagacggaactaaggaacaagatgcagcagaagtcacagaagaaaccagaatttgataatgaaaagccagctgctgtggttgctcctcttacaacagggtacactgtgaaaatcagtaattatggatgggatcagtcagataagtttgtgaaaatctacattactttaactggagttcatcaggttcctgctgagaatgtgcaagtacacttcacagagaggtcatttgatcttttggtaaaaaacctcaatggcaagaattactccatgattgtgaacaatcttttgaaacctatctctgtggaaagcagttcaaaaaaagtcaagactgatacagttattatcctatgtagaaagaaagcagaaaacacacgatgggactacttaactcaggtggaaaaagaatgcaaagagaaagaaaagccttcctacgacactgaggcagatcctagtgagggattaatgaatgttctaaagaaaatttatgaagatggagatgatgacatgaagcgaaccattaataaagcgtgggtggaatcccgagagaagcaagccagggaagacacagaattctgaggctttaaaagtcctgtgggaaccgtcatgtggagtgctcgtgtttccagtagggactgttggtgaactgcacacatgtgttcatgtgggtatgtagttttggacagatgacta

SEQ ID NO: 450 - DNA, 433 bp, Mouse
aaagttctttttcttttctttttcttttttttgtgtgtgtgtgttttggtttgttgttgttttggttttcctggaactcactctgtagaccagctagccccaaactcagaaatctgcctcccgagtgctgggactaagggtgtgcaccaccactgccctggtgcagatgactcctttaaggagctagagtaacccttgttcgcctcggtgagagtctgagaatcaggcgctttggctacacagctcaatttacacagccaagcctttagcttctatgtgtgctgggcatggacagagcctcctcatcgccagtgatgatggccgggtttccaggcagccgtggtcctgtctgaatattgtctctaactgccacagtttcagagaaaggggaacaagttctcctttgcttcttgccctcccagatagacccttg

SEQ ID NO: 451 - DNA, 1225 bp, Mouse
agaacattcgagaatatgttcggtggatgatgtattggattgtctttgcgatcttcatggcagcagaaaccttcacagacatcttcatttcctggtccggcccaaggattggcaggccatggggttgggaagggcctcaccaccaccaccacctggcctctggctcacacaaacccctccccttgcttacacacaggttcccgttttattacgagttcaagatggcttttgtgctgtggctgctctcaccttacaccaagggggccagcctgctttaccgaaagtttgtccacccatccctatcccgccatgagaaggagatcgacgcatgtatcgtgcaggcaaaggagcgcagctatgaaaccatgctcagttttgggaagcggagcctcaacatcgctgcctcagctgctgtgcaggctgctaccaagagtcaaggcgctctagctggaaggctacggagtttctctatgcaagacctgcgctctatccctgacacccctgtccccacctaccaagatcccctctacctggaagaccaggtaccccgacgtagaccccctattggataccggccaggcggcctgcagggcagtgacacagaggatgagtgttggtcagacaatgagattgtcccccagccacctgttgggccccgagagaagcctctaggccgcagccagagccttcgggtggtcaagaggaagccattgactcgagagggcacctcacgctccctgaaggtccgaaccccgaaaaaggccatgccctcagacatggacagctagagtctgcagattgaggccaccttacctctggagccagcaggggacctttcgctgctacaccagctaccggggttctgctccgtctggcttgtgcctaaatggcacatggcgtggtaccctgcacagggagacattcactgtaccaaagcagcccaggcctggggcctatttattgccttcctctgccttttgctttctcagacatgggaccagagccccaccagtccctaccgacgaaaccaaaagtccaaccagctgtgttcattccttcttgtccttcaaaatacttgacagccttttccaaggcctggtgtgtgtgtgtgtgtgtgtgtgtgtgtgtgtgtgtgtgtgtttacgtacactagctgcatgtttcgtgttggtgagtgaggtcaggcttatgaatatttttatataaataaataccaaacagtgaa

SEQ ID NO: 452 - DNA, 445 bp, Mouse
caaatgcttacttttctggtgcagaaagattgttgggaacagacaggaaccaatgtgggaattcaacttcaagttcaaaaaacagtcccctaggttaaagagcaagtgtacaggaggattgcagcctcccgttcagtacgaagatgttcataccaatccagaccaggactgctgcctactgcaggtcaccaccctcaatttcatctttattccgattgtcatgggaatgatatttactctgtttactatcaatgtgagcacggacatgcggcatcatcgagtgagactggtgttccaagattcccctgtccatggtggtcggaaactgcgcagtgaacagggtgtgcaagtcatcctggaccagtgcacagcgttcggctctttgactggtggcatcctcagtacccattctccctgagagcgtagttactgcttcccatccctt

SEQ ID NO: 453 - DNA, 2792 bp, Mouse
gaagagccgtgcaataatgggtctgaaatccttgcttataacatcgatctgggagacagctgcattactgtgggcaacactaccacacacgtgatgaagaacctccttccagaaacgacataccggatcagaattcaggctatcaatgaaattggagttggaccatttagtcagttcattaaagcaaaaactcggccattaccgccttcgcctcctaggcttgagtgtgctgcgtctggtcctcagagcctgaagctcaagtggggagacagtaactccaagacacatgctgctggtgacatggtgtacacactacagctggaagacaggaacaagaggtttatctcaatctaccgaggacccagccacacctacaaggtccagagactgacagagtttacctgctactccttcaggatccaggcaatgagcgaggcaggggaggggccttactcagaaacctacaccttcagcacaaccaaaagcgtgcctcccaccctcaaagcacctcgagtgacgcagttagaagggaattcctgtgaaatcttctgggagacggtaccaccgatgagaggcgaccctgtgagctacgttctacaggtgctggttggaagagactctgagtacaagcaggtgtacaagggagaagaagccacattccaaatctcaggcctccagagcaacacagattacaggttccgcgtgtgtgcctgccgccgctgtgtggacacgtctcaggagctcagtggcgcgttcagcccctctgcggctttcatgttacaacagcgtgaggttatgcttacaggggacctgggaggcatggaagaggccaagatgaagggcatgatgcccaccgacgaacagtttgctgcactcatcgtgcttggcttcgcgaccctgtccattttgtttgcctttatattacagtacttcttaatgaagtaaatccagcaggccagtggtatgctcggaacgccacacgttttaatacacatttactcagagcctcccctttttacgctgtttcgttctttgatttatacgcttctcttgttttacacatttagctaggggaaagagtttggctgcacctatttgagatgcaaaactaggaagaggttaaactggatttttttttaaacaataataaataaaggaataaagaagagaaggaagcggcgggcaagctccagacaccgagagccagtgtgcccaacgagcttgccttgtcgggcttccccgtgtgcttctggtctgttcccactgatgtctttcgcaagcctttgatcatcttgtgtgttacagttcagtaatttatattcacagtcatttcttgatcatctatacctgttaacagaatcacagtgtatgtagttcagggctgggattccggtgttgtcagagtattgccacatgagaatattcagtgtgccttcggaggaggccacctcgaccatccttacgtcactcagttacgtaactgtgttagctcatctaagtcaaagtgtgtactttaatctaaaatgttttattactctgtatcccttatgattttaacactatgagttgcctgtctaagaagtcacataaccaaatgcgcctataaatgatagagcattgtagattttcacatcggtccatagcagtaactttaagagggcattgtgcaatagttagttgtttcttgttcggctactttaaaagctgctttaacttgtctgtctgtctttgtacataactacttctaatataatcactagagttattatattctgttatgtttgaccggaattatgtgacgagagctcatggcagttgtgaactgtctccttacatgttggcccatcatatttgaaagacttgcctttggctattctttggggtgtcagtgacgtgaatgaagttgaataccatatttcagtgcccatgatactaatgtagcagtagatagaaatcttactgataaagcccaccacaagggaaccatttacatttgtcctgtttctgggggcttcatctggccgcatggagagagggagtggaaactggctgtgagcatgagatgtttgggggccaaagagcctactagattctctccctgggtctgtcactaatttgctttgtgacctctctgtgcctgttttcccatgcatgagtaatcaaatcaaatggggattcaatacctgtaagtgctaagagaccttggatccaccggtgctatgtaagtgcggagaatcactctcacggattcacttagagtcatgaggtaatgagttctaacccaaagtcattggatccctcaaccaagtccacaatgttcaagtacctcagggacacttaagaagttggaggtgcaactgtattccaaaagggtgcgacagacacagccgattcccctcttcctgtttttttgtatatttttgctccttggtttttcttgatcatagctactttgtgcttggtctatgttgtctatgatgcagtaagtaccctgtactagcttatactattcccataccaaagtcatggggaaaccaacattattttgttttgggtttatttatactctattctgcatacagtactttaaatgccaatgacagtgcaatctttatttattgtaatgttaaatgtacttattactaatgtgccctcctagcatgttatattttgtgtgttttatactttttgtaattttaggtcagtttagttccttggcaacatctgtagtattagccttctgacatctttcttgtgtttttaaagataagagcatctaactcattaaatgc

SEQ ID NO: 454 - DNA, 1808 bp, Mouse
gacttctgctagtacttgctcctggcggtggctgagcaaccggtctcaccagcatgctctgcctgtgcctgtatgtgcccatcgccggggcggctcagactgagttccagtactttgagtccaaggggcttcctgccgagctgaaatccatcttcaaactcagtgtctttatcccctctcaagagttctccacataccgccaatggaagcagaaaattgtgcaagcaggtgacaaggaccttgatgggcaactggactttgaagagtttgtacattacctccaagatcatgagaaaaaactgaggctggtgttcaagagtctggacaaaaagaatgatggtcgaatcgatgctcaggagatcatgcagtccctgcgggacctgggtgtcaagatctcggaacagcaggcggagaagattcttaagagcatggataagaatggcacgatgaccatcgactggaacgagtggagggactaccacctcctgcaccctgtggagaacatcccggagatcatcctgtactggaagcactcgacgatcttcgatgtcggtgagaatctgacagtcccagatgagttcacagtggaggagaggcagacggggatgtggtggaggcacctggtggcaggaggtggggcaggggcagtttccagaacctgcactgcccccctggacagactgaaggtgctcatgcaggtccatgcctcccgcagcaacaacatgtgcatcgtaggtggattcacacagatgattcgagaagggggagccaagtcactctggcggggcaacggcatcaatgtcctcaaaattgcccctgagtcggccatcaaattcatggcatatgagcagatgaaacggcttgtcggtagtgatcaggagacgctgaggatccacgaaaggcttgtggcaggctccttggccggagccattgcccagagtagcatctacccaatggaggttctgaagacccgaatggccctgcggaaaacaggacagtactccggcatgctggactgtgccaggaggatcttggctaaagagggtgtagctgccttctacaaaggctacatccccaacatgctggggatcatcccctatgctggcatcgacctagctgtctatgagacattgaaaaatacctggctccagcgctacgcagtaaacagtgcagaccccggtgtgttcgtgctcctggcctgtggtactatctccagtacttgtggccagctggccagctacccactagccctggtcaggacccggatgcaggcacaagcctccattgagggcgcacctgaggtaaccatgagcagcctcttcaaacagattctgcggactgagggggcctttgggctctaccgggggctggcccccaacttcatgaaggtgatcccggctgtgagcatcagctacgtggtctacgaaaacctgaagatcaccctgggcgtgcagtctcggtgacgggagggtggtggacttggtgagcctgggctgcggcccagggtatgcagccacctcattctgtgaatgtgccaacactaagctgacttacccaagctgtgaaacccaggataccataggggacgggcagggagctggcaagctctgggctggttctgctgacctggcagaccttcgtgtctcttccaaggaagacctgtggatgttccttggggttcaggggtcagtaagatgtaggctcctgcactagagacaggacgttttcctcagtgcctgccagatagcgagcttggatgccagcttagttcttccatctcgttcactcagccggacctcagccacggg

SEQ ID NO: 455 - DNA, 1121 bp, Rat
  misc_feature (1)...(1121): n = A,T,C or G
gcggtcagaacccgggcttctcgtttgtcctgaacggcactaccagggcggtggaagcagagatggcggagggcggtgggaggagaggcgtctagtcttgctggctcagcaagcccgataagcatgaagctgctgtgtttggtggctgtggtggggtgcttgctggtacccccggctcaagccaacaagagctctgaagatatccggtgcaaatgcatctgtcccccttacagaaacatcagcgggcacatttacaaccagaatgtgtctcagaaggactgcaactgcctgcatgtggtggagcccatgccggtgcctggccatgatgtggaagcctactgcctgctctgtgagtgtaggtatgaggagcgcagcaccacaaccatcaaggtcattatcgtcatctacctgtctgtggtaggggccctcttactctacatggccttcctgatgctggtggaccctctcatccgaaagccggatgcctatactgagcagctgcacaatgaagaagagaatgaggatgcccgctccatggctgccgccgccgcatccattggaggaccccgagcaaacaccgtcctggagcgggtggaaggcgctcagcagcgatggaagctacaggtgcaggagcagcggaagacggtcttcgatcgacacaagatgctcagttagatgattgccatggcagtgtcagggacccagacctcggctaccagcttctggggcagtcttccctgggtcttcccttcaaatgcccgtggcatttgtccttctccctctctctagaaatgtactcgactgttataactagggagtgggattgggtctttggtctctagtgtctctgtaggtctctggggtagaagggagggaaaggaaggcagaagagaacagagatggttgagacggccacacgattggtgaaattcctccctcctgtcctcgccgttcctcacagctccacatcttaaggatgtttatagctctttgggagacggagctgtgccgtcaatagctcggtgggtgcgacgaaagtgtgacccagccctcagcctgtgctctacgatgccgtggcccccattcccacttttncagtgccaatactttagcttggcctg

SEQ ID NO: 456 - protein, 75 aa, Mouse
KPLPMEAHSRREKASGLRLAWHYECSGVSVWWMCVLGWLSFLVFLLFSLVCSFPSPINHSHMLPCLFLRGGGSNV

SEQ ID NO: 457 - protein, 49 aa, Rat
TACRVSISVLYMLHTELKKCWFFLFCFSLFLWFCFWFCFLLPRFDYLPM

SEQ ID NO: 458 - protein, 296 aa, Mouse
GACYCPAGFLGADCSLACPQGRFGPSCAHVCTCGQGAACDPVSGTCICPPGKTGGHCERGCPQDRFGKGCEHKCACRNGGLCHATNGSCSCPLGWMGPHCEHACPAGRYGAACLLECSCQNNGSCEPTSGACLCGPGFYGQACEDTCPAGFHGSGCQRVCECQQGAPCDPVSGRCLCPAGFRGQFCERGCKPGFFGDGCLQQCNCPTGVPCDPISGLCLCPPGRAGTTCDLDCRRGRFGPGCALRCDCGGGADCDPISGQCHCVDSYTGPTCREVPTQLSSIRPAPQHSSSKAMKH

SEQ ID NO: 459 - protein, 106 aa, Mouse
VGTPYYMSPERIHENGYNFKSDIWSLGCLLYEMAALQSPFYGDKMNLYSLCKKIEQCDYPPLPSDHYSEELRQLVNICINPDPEKRPDIAYVYDVAKRMHACTAST

SEQ ID NO: 460 - protein, 53 aa, Mouse
MCAGHGQSLLIASDDGRVSRQPWSCLNIVSNCHSFRERGTSSPLLLALPDRPL

SEQ ID NO: 461 - protein, 261 aa, Mouse
NIREYVRWMMYWIVFAIFMAAETFTDIFISWSGPRIGRPWGWEGPHHHHHLASGSHKPLPLLTHRFPFYYEFKMAFVLWLLSPYTKGASLLYRKFVHPSLSRHEKEIDACIVQAKERSYETMLSFGKRSLNIAASAAVQAATKSQGALAGRLRSFSMQDLRSIPDTPVPTYQDPLYLEDQVPRRRPPIGYRPGGLQGSDTEDECWSDNEIVPQPPVGPREKPLGRSQSLRVVKRKPLTREGTSRSLKVRTPKKAMPSDMDS

SEQ ID NO: 462 - protein, 138 aa, Mouse
KCLLFWCRKIVGNRQEPMWEFNFKFKKQSPRLKSKCTGGLQPPVQYEDVHTNPDQDCCLLQVTTLNFIFIPIVMGMIFTLFTINVSTDMRHHRVRLVFQDSPVHGGRKLRSEQGVQVILDQCTAFGSLTGGILSTHSP

SEQ ID NO: 463 - protein, 314 aa, Mouse; identical to SEQ ID NO: 193

SEQ ID NO: 464 - DNA, 1663 bp, Mouse; identical to SEQ ID NO: 370

SEQ ID NO: 465 - protein, 99 aa, Mouse; identical to SEQ ID NO: 340

SEQ ID NO: 466 - DNA, 886 bp, Rat
gtgactcctgctgtaggaccctccaggaagcactggcctctcctacagagtcctccacctagcaccggccttaatgctaaagccaaatgtggtttctgccctgcagcgtgcccctggtaatctcgagttgccactcccaagccagcccccactggccatatggcatcatatctgggggtcaggagggcctgtgcaggctttggacagccacttgccacagcagaggagagagtgaggtttccaggagcagcaggaaggaagaccccagaattccccagggctctttgagtggtaatgttgacttctggagagtctgcccaccttgtgctcacacaagcatggacaggacactgggacttttatcctgttgttaagctgtttccacagaagcccgttcaggtagttacttcacccacattggccctatagccagaggagtgccctggctaactgcagtgtgagcttgtaagcaacagaagtgcccaggagctgaccccaaaggccaggaaggctcgagcttgccactttccctgaccaatacagtcttcccatcctgttgacattctgactacatataaattgcaatatttgaggcagctctgtgcagtgagcagcctctgcatccagaccctgaccctatgtggatgatgctctgtgtatacgtgtgtgtgtgtgtgtgtgtgtgtgtgtgtgtgtgtgtgtgtgtatgtgggcacctatgcatactcacattcagagccttaatacctagttggtgccatctcccctgtatctgatccttcatttctgagttttgtatccatttgtctctctccttcctcagcctgggggtatgtttgctccatgccttgaaataaatggaaatacatgtaaaaaaaaaaaaaaa

SEQ ID NO: 467 - DNA, 1076 bp, Human
gtcattggcaggtttacttgtggccagctctctctgcccttgggtgtctgagcaggcagaccagaagaccaggcactggacctgcatgccaaagggactggtcatctcctgaggacctgtacatgaccctgtggactgttccgcacgatccggaacccactttttattcactccccatgtctttggccttcctcttctttctctttccctctgccatcctgacactgatagtttgtcatataaattccccgggttgtgtttttttttctagaaaaaaattaaaagggaaaacaaaaccaaaaaaaccagaaaccacgaataagaatggaaatgacaatggctgcctgtcatttttctgtcacgattttcctgatttggtttgttccctttgtctcagagaagcaggagatgttgatgaggctgtatttttttttctttttcttgtttttgagacaagagtctcgctctgtcacccgggctggagtgtaacgtggcatgatctcagctcactgcaacctctgcctcctgggttcaagcgattatcctgcctcagcctcctgagtagctgggattacaggcatgcgccactatgcccagataatttttttgtatttttagtagagacagggtttcaccatgttggccaggctggtctggaactcctaacctcaggttatccacccaccttggcctcccaaagtgctgggattataggcatgaaccaccgtgcctggccaaagatgtaatttaaaatagttagaagggacttggcatgggccagctccgtgcatggcattttcacccccagagcttcctaatcctgttttcacacaggaagtttctaggtctttctagaacagctagaaatagtagctgactcccgcccaaggcccaaccttcaaaccctgagctcttcaggctgcatcctctggtgagctatagaggagaacgtggctcctaaactctagccatcctgtgggaggaaatagacttctttgggctctggcttgcagaacaaactacactttttttccctctattgtttaaattttatttaataaaaaaaaaaaaaaaaa

SEQ ID NO: 468 - DNA, 448 bp, Human
tttttttttttttttattggagacagggtctcactctgtttcccaggccagagtgcagtggctcgatcactgctcactgcagcctcgatgtcccaggttcaagtgatcctcctcaccttggtctcccaaagtgttgggattataggcatgagccactgtatcaagccagttaagagcatttatatcaagctggattgcagaaagagaagagacaagacttcactccttttctgccctcaaggacccagaaatcctgtttctaaagccccccaccagctccagtgtgtgcctgtaagtagggttcctactggcactgaatcttctgggacttgatgtcaacctgtccttatacaggtataactggaaggtcctttccttgccagagcaggctcgtgctagaaacttggaatacaaagaaaagcttaacgaaaaaagctaaaaaaaaaaa

SEQ ID NO: 469 - DNA, 1500 bp, Human
ggaagaactagtctcgagtttttttcttaacaggttttttgagatataattcacaaaccatacagtttacctatttaaagggtatgattcagtggtttttagtctattcacagatgtgtgcagttgtcaccacagtcagttttagatcaaaaaccctgtaccctttagctattgttcccccattccctttctcatccctcagccagtccttctccccagtgccccttcactgtgttgtgtaggtgtattcaagtgtgtgggcagtgtaaggaatgtttaaaagccaattttgccttatgtattgattttagaaccttatttgtagcaatttattgaaaaaaaaaaaacgtatttgaaactttgacagcaactgtggtgctgctgcagccaggtcactgacagctctaatggcccctttattatctctttcctgtttctgggcaaacctcttagccattcgttcctggttaactcggaaacacatccagaggctgcatgcagctgccacagtcatcaagcgtgcatggcagaagtggagaatcagaatggcctgccttgctgctaaagagctggatggtgtggaagaaaaacacttctctcaagctccctgttccctgagcacctcgccgctgcagaccaggctcctggaggcaataatccgcctctggcccctgggactggtcctggccaatacggctatgggtgtaggcagctttcagaggaaattagtggtctgggcttgcctccagctccccaggggcagccccagtagctacactgtccagacagcacaagaccaggctggtgtcacgtccatccgagcgctgcctcagggatcgataaagtttcactgcagaaagtctccactgcggtatgctgacatctgccctgaaccttcaccctacagcattacaggctttaatcagattctgctggaaagacacaggctgatccacgtgacctcttctgccttcactgggctggggtgatccttggtgcctttgtttccacaaggccttttcctgccccctgccttgccaaagacatttaatcagcacacagctgccagactattcccacagtgctccaaatgcacatgaacaacagtgacggctccagccttcgacccagagccccgtgcccagtgcgtcagtgggcctggggttccaggctacatcaagcactgatggtgtcagggctggtagttaccaaatcagggttaagaaacatcagggccacatttcactaccttcacagatcaaactcagcagcagtcatgactgtctgtcactacactggggatcccaattccacataagcacttttggaagaaaacagccaaagttggcctaaaattggcgctggaatttgggctgggaaaaatcttgtggttatttcctttaaaaaggaacaaaactttagtatttaattagttgatttatttaatgtaatttcaaacaattaaattatgaataatgcaatgtaaaaaaaaaaaaaaaa

SEQ ID NO: 470 - DNA, 1031 bp, Human
gtagcagttggatgcccagctgggggtaggcagtctggagggtcctgaatttgggagctcagatgtgtgggccacccggacatgctggagaagggcatttggggaaaacggctctgaggggtggacacctgccctctggcctcaccagctgtggacaggtgtgtgctgattgtgtttctggtcttttaaggacatcgtgctgggctgcagatgttgctgttttttaattgaaactttattgcccgctggacatggtggctcatgccccctaatccccacctaaccctaatcctaatcacagcactttgggaggctgtggtgggaggatcacttaagcctaggaggttaagactggagtgctgtacaatcgcaccactgcattccacagcctgggcaacagagggggaccctgtctcaaaaaaaagagaaactgctgttgccataatagttgtaagaaataatacagagcgatcccttgttctctctgcccaacttttcctaacagtgagtctttgcagaacaccacagtctcacacaaggacatggactttgatgccatccggtggccttacttagcctccgcccatctcgcttagcatccccaggaagatccctgtgtggccctttcacacctatgtctctaacgccatcttatccctaatccctggcaaccatagcccatcttccgtttctagaattttgtcatctcagaaatatcatatccagctgggcatggtggctcacacttgtaatcccagcactttgggagactgaggtgggcagatcacttgaggtcaggagttcgagaccagcctggccaacatggtgaaattccgtctgtactaaatatacaaaaattagtcgggcgtggtggcgcacgcctgtaatccagctactcaggaggctgaggcaggagaattgcttgaacccgggagacagaggttgcagtgagccaagatcgtgccactgtactccagcctgggtgacagagtgagtgagactctgtctccaaaaaaaaaaaaaaaaaaaaa

SEQ ID NO: 471 - DNA, 792 bp, Human
cggctgtggctggtgctggggtcggtgttcatgatcctgctgatcatcgtgtactgggacagcgcaggcgccgcgcacttctacttgcacacgtccttctctaggccgcacacggggccgccgctgcccacgcccgggccggacagggacagggagctcacggccgactccgatgtcgacgagtttctggacaagtttctcagtgctggcgtgaagcagagcgaccttcccagaaaggagacggagcagccgcctgcgccggggagcatggaggagagcgtgagaggctacgactggtccccgcgcgacgcccggcgcagcccagaccagggccggcagcaggcggagcggaggagcgtgctgcggggcttctgcgccaactccagcctggccttccccaccaaggagcgcgcattcgacgacatccccaactcggagctgagccacctgatcgtggacgaccggcacggggccatctactgctacgtgcccaaggtggcctgcaccaactggaagcgcgtgatgatcgtgctgagcggaagcctgctgcaccgcggtgcgccctaccgcgacccgctgcgcatcccgcgcgagcacgtgcacaacgccagcgcgcacctgaccttcaacaagttctggcgccgctacgggaagctctcccgccacctcatgaaggtcaagctcaagaagtacaccaagttcctcttcgtgcgcgaccccttcgtgcgcctgatctccgccttccgcagcaagttcgagctggagaacgaggagttctaccgcaagttcgcc

SEQ ID NO: 472 - DNA, 988 bp, Rat
ctggagtatgccaggtactacatgaggccggttgtcccaatccacgtgttttctagtgaagacagcccaccccgggatgctcccagcacctcctccgtggcccctgcatccagagcagtgcacacgccacccctcggacccatcctgaagaagacagctggcctggggttctgcgccgttttcctctacttcatcactgcccttatcttccccgctatctccaccaacatccagcccatgcacaagggcaccggctctccatggacctccaagttctatgtgcccctcaccgtcttcctccttttcaactttgctgacctctgcggccgacaggtcacagcctggatccaggtgccaggtcctaggagcaagctgctccccatactggcagtctctcgcgtctgccttgtgcctctcttcctgctctgtaactaccagccacgctcacacctgactctggtgcttttccagtctgacatctaccctatactcttcacctgcctcttggggctcagtaatggctacctcagcacgctggtgctcatgtatgggcccaagattgtgccccgggagctggctgaggccaccagtgtggtgatgctgttctacatgtcactgggtttgatgctgggctcagcctgtgcggccttgcttgagcactttatctaggaggggcggcaaggatgtgggttctgtgtgagtgagtgtggtttgggtccctgggacctggacagggtgagccgaggtctcatggcgttaagcaaggggttggtgttttgcttgatgtacagcagagcccactcagactgtctttctctcagacacatccttgcacatcttgttcaaggagacattccagacacagcccagcatggtggctcacacctgtaatcccagcattcaagaggctggagctagaggactgctgtgagttcaaggccagcctggctccatagtaaaaccctttcttaaaaaaaaaaaaaaaaaa

SEQ ID NO: 473 - DNA, 1184 bp, Human
ggcagggagaaatataaacaaaggaacatatttttaatttaatgaagcaaaattccatacatcattttgaaaatagtgtttctttccctgataggcctgttctgcatcattcttttagcttccttctgccctgtttatcacttggtcccacttttatatttttcctcttcggtccagaatttcttatttagtttcttgtattttgcctactccctcccttctccatgattcagcctagtctttccgtcctctgtggacttgggtgtgccttcctctgggccacctcgtcttttgctgctgttagccctcccgcctgcgcacctgccacttcaccctcgcctgtggtccacttacgttccactcagcccggtcagtcctgctttgttcttctccaccgccttggtctcccgtgtgtcttatctagctctggttccttctcgtctccacatttattttgttttcttcctgtgcttgttagtccttgtgcacttggtccttgagctctttttctattaataggtattactagatggatttgttgtctgcctttacatagaacacacatccttactgtgcatttcctgggtagccaggatgaatcaattattattaacttcccttcgaacattgagcttcctctgttttctgtttctaagaattagattagtattctagaagactaatactactttaaagacagtcaaaacagtcatacgctgccatttcagccctttatttaagagtttgtgacatttatcactcccttgaaagattaaagaacacccaaagcaagtttggggtggaggtggggaaggcaggaagagaaaggtaagtgctataaaaggactcattgttaatttctagaaattggactgagatctgaaagcataagccttaacattttttagataaacggtccctgaaaagaataaaaagtatcagtacttccgttaactagctttagtattgggtcatttgtagtttacattctcctttaagttttaagaccttcagtagttaacaaagcagacagagactggccaggcacagtggctcacacctgtaataccagcactttgggaggctgagttgggtggatcacaaggtcaggagattgaaaccatcctggccaacatggtgaaaccccgtctctactaaaaatacaaaaaaaaaaaaaaaaaaaa

SEQ ID NO: 474 - DNA, 774 bp, Human
gccaggggtagcggtgtagctgcgcagcgtcgcgcgcgctaccgcacccaggttcggcccgtaggcgtctggcagcccggcgccatcttcatcgagcgccatggccgcagcctgcgggccgggagcggccgggtactgcttgctcctcggcttgcatttgtttctgctgaccgcgggccctgccctgggctggaacgaccctgacagaatgttgctgcgggatgtaaaagctcttaccctccactatgaccgctataccacctcccgcaggctggatcccatcccacagttgaaatgtgttggaggcacagctggttgtgattcttataccccaaaagtcatacagtgtcagaacaaaggctgggatgggtatgatgtacagtgggaatgtaagacggacttagatattgcatacaaatttggaaaaactgtggtgagctgtgaaggctatgagtcctctgaagaccagtatgtactaagaggttcttgtggcttggagtataatttagattatacagaacttggcctgcagaaactgaaggagtctggaaagcagcacggctttgcctctttctctgattattattataagtggtcctcggcggattcctgtaacatgagtggattgattaccatcgtggtactccttgggatcgcctttgtagtctataagctgttcctgagtgacgggcagtattctcctccaccgtactctgagtatcctccattttcccaccgttaccagagattcaccaactcagcaggacctcctcc

SEQ ID NO: 475 - DNA, 2795 bp, Rat
ctcggggtgccggtgcgggagaccaggggggtctcccatgctgctattgctgctgctgttgcttcccgcgtgtcctctgctgagcgctcggatgtttccaggaaatgctggtggagagctagtcactccccactgggttttggatgggaaaacgtggctcaaggtcaccctgaaagagcagatctccaagcctgactcagggctggtggctttaaaggctgaaggccaggatctcctgcttgaattggagaagaaccacaggcttctggccccaggatacacagaaacctactacagccgggatgggcagcccatagtgctgtcccccaaccacacggatcattgccactatcaggggtgtgtgaggggcttccgggaatcctgggtagtcctcagcacctgctcggggatgagtggccttattgtgcttagcagcaaagtgagctattatctacacccctggatgcctggggacaccaaggacttcccaacccacaagatcttccgggtggaacaattgttcacctggagaggggcccggaaagacaagaactcccaattcaaagcaggaatggcccgtcttcctcatgtcccccacagacggatgaggcgagaggctcgcaggagtcccaagtacctggaactgtacatagtggctgaccacgccctgttcttgcttcagcgtcagaatttgaaccacacaagacagcgcctcctggaaattgccaattgcgtggaccagattctcaggactctggatattcagttggtgttgaccgggctggaagtgtggacggagcaggatcatagccgcatcacgcaggacgcaaacgaaacgctctgggctttcctacagtggcgccgtgggctgtgggtcaggagaccacacgactccacgcaactgctcacgggccgcactttccagggtaccacggtgggcctggcgcctgtggagggcatgtgccacgcagagagctccggaggtgtgagcacagaccactcggaactccccatcggcacagcagccaccatggcccacgagataggccacagcctaggcctccaccatgacccagagggctgctgcatggaggcagacgcagaacaaggaggctgcgtcatggaagcagctacagggcatcctttcccgcgcgtcttcagcgcctgcagccgccgccagctgcgcaccttcttccgcaaagggggcggtgcgtgcctctctaacgtctcggctcccgggctcctggtgctgcccagccgctgcggaaacggcttcgtggaagcagaagaagagtgcgactgcggttctggccagaagcgcccagatccctgctgctttgcccacaactgttccctgcgtgccggggcgcaatgcgcccagggtgattgctgtgcgcggtgcctgctaaagcccgcaggcacaccttgtcgtcccgccgcgaacgactgcgacctccccgagttctgcaccggcacctcccctcattgtcccgcagatgtttacctactggatggctcaccctgcgctgagggtcgtggctattgcctagatggctggtgtcccacgctggagaagcagtgccagcagctatgggggcctggatcccagccggctcctgagccatgtttccagcagatgaactccgtggggaattcacaggggaactgtggccaggacagtaagggtagcttcctgccctgcacacagagggacgctcagtgtgggaagttgctgtgccagggagggaagccaaacccactagtgccgcacgtagtgactgtggattccacaattctgctagagggccgccaagtgctttgccggggagctttcgtactccctgatactcatctggaccagcttggcttgggtctggtggagccaggcacccgctgtggacctagaatggtgtgccaggagaggcactgtcagaatgctacctcccaggagttggagcgttgctcgagtggctgccataaccgtggggtttgcaatagcaatcgtaactgtcactgtgctgcaggctgggctccacccttctgtgacaagcctggcttgggtggtagtgtggatagtggccctgcacagtctgcgaatccagatgccttcccattggccatgctactcagctttctgctgcctctacttcctggggctggcctagcctggtgctactaccagctcccaacactctgtcagcaaccaggacggtgctgcaggagggacgccctatgtaatagggaccaacctctgggcagtgttcaccccgtggagtttggctccatcatcactggagagccctcgcccccgaaccctgaggagtctgagcttacctaggagctgcctgccctctgaggcttgtgccgtgcagacctgcccgatccctacggtaggtgaagcaccccaggccctcccattgcccagtcaccaatctgtctcagtttgttgcctactcctcagatttatgggctataaataaggaaacaggcatgggcctcagagaagccattgtcatggagaccaggatgctggaagccctaagggcagggaaggcagaccttgtggttcttaggacgaatgtgtcctgccacataacttgcagcctctgggcccagtcctcagcgactcagtgcactctcatacttccgatggccggatgctgagctccctactcaccacaggaacccagagccatctcatgatgtatcccacctgccgggagagccgtgctattctgaaatgtcacaatgtatctagtaacagtaaatccacaagctctaaaaaaaaaaaaaaa

SEQ ID NO: 476 - DNA, 1953 bp, Rat
gatgtggatcactgctctgctgctgctcgtgctgctgctggtggtcgttcacagggtttatgtgggccttttcaccggaagttccccgaaccccttcgctgaggatgtcaagcggccacctgaacccctagtgaccgacaaggaagctaggaagaaagttctcaaacaagctttctcagtcagccgagtaccagagaagctggacgcagtggtgattggcagcggcattgggggactggcctcagctgcgattctagctaaagctggcaagagagtccttgtgctggaacaacacaccaaggcaggcggctgttgtcatacctttggggaaaatggccttgaatttgacactggaattcattatattggacgaatgcgggagggcaacattggccgtttcatcttggaccagatcaccgaagggcaactggactgggcccctatggcctccccttttgacttgatgatactagaaggacccaatggccgaaaggagttccccatgtacagtgggaggaaagaatacatccagggccttaaggagaagttccccaaggaagaggctgtcattgacaaatacatggagctggttaaggtggtggcccatggagtctctcatgccatcctactgaagttcctcccattgcccttgactcagctcctcaacaagtttgggcttctgactcgtttttctccattctgccgagcgtctactcagagcctagctgaagtcctgaaacagcttggggcttcccctgagctccaggctgttcttagctacattttccccacttacggagtaacccccagccataccaccttttccttgcacgctctgctggttgaccactacatacaaggggcatattacccccgagggggctccagtgagattgctttccataccatccctttgattcagcgggccgggggcgctgtcctcaccagggccaccgtacagagtgtgctgctggactcagctgggagagcgtgcggtgtcagtgtgaagaagggacaagagctggtgaacatctactgcccagttgtcatctccaatgcgggaatgttcaatacctatcagcacctgttgccagagtctgtccgctacctgccagatgtgaagaagcagctgacaatggtaaagcctggtttgagcatgctgtcaattttcatctgtctgaagggcaccaaggaggagctcaagcttcagtccaccaactactatgtttattttgacacagacatggacaaagcgatggagcgctatgtctctatgcccaaggaaaaggctccagaacacattccccttctcttcattgccttcccatcaagcaaggatccaacctgggaggaccgattcccagaccgatccacaatgactgtgctggtacccacggcctttgaatggttcgaggagtggcaggaggagcctaagggcaagcgaggtgttgactatgagaccctcaaaaataccttcctggaagcctctatgtcggtgatcatgaaactgttcccacagctggaaggcaaggtggagagtgtgactggaggatccccactgaccaaccagtactatctggctgcacaccgaggagctacttatggggctgaccatgacctggctcgtctgcatcctcatgcaatggcttccctaagagcccaaacccccatccccaacctctacctgacaggccaagatatcttcacctgtgggctgatgggggccctgcaaggggccctgctgtgcagcagtgccatcctgaaacggaacctgtactcagatctgcaggctcttggctcaaaggtcagggcacaaaagaagaagaagtagtctattcagagatgagctagaggaacagcgcctccccagcttttcatggtgtcctcctacgtaattccttgcacatagaaacaaaaaccattttgtttctcataaaaaaaaaaaaaaaaaaa

SEQ ID NO: 477 - DNA, 1714 bp, Rat
attcggcagagagaatttctatgaggtgcaggtcccagaggacacacccattggctccagtattattactatctctgctaaagatttagatatgggaaattatgggaaaatatcatattcatttttgcatgcaacagaagatgttagaaaaacctttgaaatcaacccaacatctggggaagtcaatttgagatcactgctggattttgaagtaatacagtcctattctgtaactatccaagcaacagatggtggaggtctttcagcaaaatgcactctttcagttaaagtattagatataaatgacaatgcaccagaagtgatcatatcatcggttacaaagacaattccagagaatgcttcagagaccctgatcactctgttcagtgtccgagatcaagactctggagacaatggaaggatcctttgctctattccggatgaccttccatttattctaaagcccaccttcaagaattttttcactctactttctgaaaaagcactggacagagaaagtagagctgagtacaacatcaccatcactgtctcagatctgggcacacccaggctcacaacccagcacaccataacagtgcaggtgtctgacatcaacgacaacgcccccgccttcacccaaacctcctacaccatgtttgtccacgagaacaacagccccgccctgcacataggcaccatcagtgccacagactcagactcaggctccaatgcccacatcacctactcgctgatgccgcctcgagacccacagctggccctcgactccctcatctccatcaatgctgacaacgggcagctgttcgcactcagggcgctggactatgaggtgctgcaggccttcgagttccgcgtgggtgccacagacagaggctcacccgcgctcagcagccaggctctggtgcgcgtggtggtgctggacgacaatgacaatgcgcccttcgtgctctacccgctgcagaatgcctcagcgccctacacagagctgctgcccagggcggcagagcctggatacctggttaccaaggtggtagctgtggaccgcgactctggccagaatgcctggctgtcattccagctgctcaaagccacggagccggggctgttcagcgtgtgggcgcacaatggcgaggtacgcacctccaggctgctgagcgagcgcgatgcacccaagcacaaactgctgctgatggtcaaggacaatggagatcctccgcgctctgccagtgttatgttgcacgtgctagtggtagatggcttctctcagccctacctgcctctgccagaggtggcgcacaatcctgcacacgacgaggacactctaacactgtacctggtcatagccttggcatctgtgtcttctctcttcctcttgtctgtgctgctgttcgtgggggtgaggctgtgcaagaaggccagggcagcttctctgggtggctgctctgtgcccgagggccactttcctggccacctggtggacgttaccggcactggaaccctgtcccagaactaccagtatgaggtgtgtttgacaggaagtactgggacaaacgagttcaaattcctgaagccagtcatgcccagtcttcaactccaggaccccgattctaatatgctggtaaaggagaactttcggaatagcctgggttttaatattcaataaaaatttcctttaaactttaaaaaaaaaaaaaaa

SEQ ID NO: 478 - DNA, 3134 bp, Mouse
agcctccactttgagccttccaagatcaacatcttccacaaggactgcaagcgcaatggcagggatgccacctgcctggctgccttcctctgcttcggacctatcttcctggcaccccacttccacacagcaaccgtcggcatcaggtacaatgcaaccatggatgagagacggtatatgccacgggcacatctggatgagggtgcagaccagttcaccaacagggctgtcctactctcttctggtcaggaacactgtcaaaggatcaacttccacgtcctggacactgccgactacgtgaagccagtggccttctctgtggaatattccctagaggaccctgaccatggccccatgctggacaacggctggcccactacactcagagtgtcggtgcccttctggaatggctgtaatgaggatgaacactgtgtccctgaccttgtactggatgctcgaagtgatctgcccactgccatggagtactgccaacaggtgctgaggaggccggcccaggactgctccagttacacactgtccttcgacaccactgtcttcatcatagagagcacacggcgccgggtagcagtagaggccacgctggagaacagaggagagaatgcttacagtgcagtcctcaatatctcccagtcagagaacctgcagtttgccagcctgatccagaaggatgactcagacaacagcatcgagtgtgtgaatgaggagaggcggctacacaagaaagtctgcaacgtcagttaccccttcttcagggccaaggccaaggtggctttccggctggatttcgagttcagcaagtctgtgttcctgcaccatcttcagatccatctgggtgccggcagcgacagtcacgagcaggacagcaccgcagatgacaacacggccctccttcgcttccacctcaaatatgaagcagacgtcctctttaccagaagcagcagcctgagccacttcgaggtcaaggccaacagctcgctggagagctatgatggcatcgggcctccattcaactgtgttttcaaggtgcagaacctgggctttttccccatccacggggtgatgatgaagattactgtgcccattgccaccaggggtggcaaccgcctgctgatgctgaaggacttcttcacagaccaggtcaacacatcctgtaacatctgggggaacagcacagagtaccggagtaccccaactgaggaagacctgagccatgccccacagaggaatcacagcaactccgatgtggtctccatcatctgcaatgtgagactagcccccaaccaggagaccagcttctacctggtggggaacctgtggctgatgtccctgaaagcactcaagtacaggtctatgaagatcacagtcaacgccgccttgcagaggcagttccacagccccttcatcttccgagaggaggaccccagtcgccaggtcacgtttgagatctccaagcaagaagactggcaggtccccatctggatcatcgtgggcagctctctgggaggcctcttgctgctggccctgctggtcctggcactgtggaagcttggtttctttaaaagtgccaagcgcaagagggagcccagcctgggccccgtccccaaagagctggagtgaggatccagaggaagcttcaagttgatgggggccagacaccagtccaggggtgtgtgggcccaggcctgtggcctcacagagctggagcaaagaggacacccgtggacttttgcattgagctcgtctctggaacgatggtaactgatccctgtgggatggacctcaagcccgtgtccagagcaacttctctactagaggttatgacgcttccagtacagatccctaaagactaaaagggacccttcgaagccttcccccaaggctccgtggaggcaatctgctgccccaaacactaaggtgctagggttgtttttatcttgcccacttctgaagaaacgcaaggggaagctagcaaatacacgcccactgtacacgccctatctagacctagagtttcaggactccaaggcccgcagcataacatccccacctctcacccctgctcttggttcccaagcacagacatcccttctccatagatagatcccaaagatctccatgagtgaacgagagttgtgtggcttgatatgacagctgcaggccaatggtggaaacgcatccagggactgtgccagatggtcaggtgggaaccaggatgctgggtacctccggaacatcggaacatcggaaagcggtagagctctccagcagtaaccaccacccactcactcctgctctcctgcctcccccgcagctcctctcagcagctttggttgctaggcaactcatgctaggaagtctgaagatgataaaaatctgtggctctccatacccacttgtctgacaactgcagcttgtccctggcaggcgcactgtggttggaagcctctgttctttgcatcacacacaaacacacacacacacacacacacacacacatacacacacgcccccgtgcgtgcacacacacacgcgcacacacgcatgcatgcatgcacacgcactcacgtgcacccatatactcatacacctcccaggcactaatgcgtgggggaagggctcctgtggaggcgctgtacagaggccttcttggcatgcactgaacaaatcccatgcaaggccactcagaccttaacctcagaggcagataggcatctcactggccagctctcgggacaagccccaaggacaaggggcatgtcggatgcccagcagagtaatttatgccttaaccctttgttgagatggaaatcgtcagatcaatgttcccttgtcatctgtttcatctgaacaatgtcatctgttcccctgtgcagtacgacctttactgtcagaaatatatttaagaaaatgttctaaaaggtattttaaaacaaccaacaacagacattccactctgtgacaaagcaaggctgcattctgtgacaaagcaaggctgcattctgttttaaagaggaaagggaggggggttggggatttggctcagtggtagagcgcttgcctagcaagcgcaaggccctgggttcagtccccagctccgaaaaaaaaaaaaaaaa

SEQ ID NO: 479 - DNA, 2100 bp, Rat
ggcgcacccatgtacttcagcgagggccgagagagaggcaaggtgtatgtctacaacctgagacagaaccggtttgtttttaatggcactctgaaggattcccacagctaccagaacgcccggttcgggtcatgcattgcctccgttcaagacctcaaccaagattcctacaatgacgtggtggtgggggcccctctggaggacagccacagaggggccatctacatcttccatggcttccaaaccaacatcctgaagaagcccgtgcagagaatatcagcctcagagctggctcccggcttgcagcattttggctgcagcatccacggacaactggacctcaatgaggacgggcttgtggacctagcagtgggcgccctgggcaacgctgtggttttgtgggcgcgtcccgtagttcagatcaacgccagcctccactttgagccttccaagatcaacatcttccacaaggactgcaagcgcaatggcagggatgccacctgcctggctgccttcctctgcttcggacctatcttcctggcaccccacttccacacagcaaccgtcggcatcaggtacaatgcaaccatggatgagagacggtatatgccacgggcacatctggatgagggtgcagaccagttcaccaacagggctgtcctactctcttctggtcaggaacactgtcaaaggatcaacttccacgtcctggacactgccgactacgtgaagccagtggccttctctgtggaatattccctagaggaccctgaccatggccccatgctggacaacggctggcccactacactcagagtgtcggtgcccttctggaatggctgtaatgaggatgaacactgtgtccctgaccttgtactggatgctcgaagtgatctgcccactgccatggagtactgccaacaggtgctgaggaggccggcccaggactgctccagttacacactgtccttcgacaccactgtcttcatcatagagagcacacggcgccgggtagcagtagaggccacgctggagaacagaggagagaatgcttacagtgcagtcctcaatatctcccagtcagagaacctgcagtttgccagcctgatccagaaggatgactcagacaacagcatcgagtgtgtgaatgaggagaggcggctacacaagaaagtctgcaacgtcagttaccccttcttcagggccaaggccaaggtggctttccggctggatttcgagttcagcaagtctgtgttcctgcaccatcttcagatccatctgggtgccggcagcgacagtcacgagcaggacagcaccgcagatgacaacacggccctccttcgcttccacctcaaatatgaagcagacgtcctctttaccagaagcagcagcctgagccacttcgaggtcaaggccaacagctcgctggagagctatgatggcatcgggcctccattcaactgtgttttcaaggtgcagaacctgggctttttccccatccacggggtgatgatgaagattactgtgcccattgccaccaggggtggcaaccgcctgctgatgctgaaggacttcttcacagaccaggtcaacacatcctgtaacatctgggggaacagcacagagtaccggagtaccccaactgaggaagacctgagccatgccccacagaggaatcacagcaactccgatgtggtctccatcatctgcaatgtgagactagcccccaaccaggagaccagcttctacctggtggggaacctgtggctgatgtccctgaaagcactcaagtacaggtctatgaagatcacagtcaacgccgccttgcagaggcagttccacagccccttcatcttccgagaggaggaccccagtcgccaggtcacgtttgagatctccaagcaagaagactggcaggtccccatctggatcatcgtgggcagctctctgggaggcctcttgctgctggccctgctggtcctggcactgggaagcttggtttctttaaaagtgccaagcgcaagagggagcccagcctgggccccgtccccaaagagctggagtgaggatccagaggaagcttcaagttgatgggggcca

SEQ ID NO: 480 - DNA, 1183 bp, Rat
cgggcactgtgactgccaagccggctatgggggcgaggcctgtggccagtgtggccttggctactttgaggcagagcgcaacagcagccatctggtatgttcggcgtgctttggtccctgtgcccgctgcacaggacccgaggaatcccactgtctgcagtgcaggaaaggctgggccctgcatcacctcaagtgtgtagacatcgatgagtgtggcacagagcaagctacctgtggagccgaccagttctgtgtgaacacggaagggtcctatgagtgccgagattgtgcaaaggcctgcctgggctgtatgggagcagggccagggcgctgcaaaaaatgcagccgtggctaccagcaggtgggctccaagtgcctagatgtggatgagtgtgagacagtggtgtgtccaggagagaacgagcagtgtgaaaacacggaaggtagctaccgctgtgtctgtgctgaaggcttcagacaggaggacggcatctgtgtgaaggagcagatcccagagtcggcgggcttcttcgcggagatgacagaggacgaaatggtggtcctgcagcagatgttctttggtgtgatcatctgtgcactggccacacttgctgctaagggggacttggtgttcaccgccatcttcattggagctgtggcagctatgactgggtactggttgtcagagcgcagtgaccgtgtgctggagggcttcatcaagggtagataatccctgccaccacttacaggatttcctcccacccaggctgcccctagaggttatttctctctcccgctggacacctgggacagcattgtttctctttgagactggggtaaatacccttttacctgccttactgagcagcccaggaccccagtggccctgggggatgaaaaagaggtcctgaagctgctgtcttgagatctttgcctagaggactggcgggcctcacagtgtgtgaattccaagacagtttctccccagggaggctgcaggtgggcttcagcccctgctctggatgagaggcgtcccctcaggggtggggcccccataggcctcctgccaggtgcatgctgccagctcctgttgtgtgttcaccgcccacaccccagccattgacttatttattcatctcaggaaataaaggacggtcttggaaactgaaaaaaaaaaaaaaaa

SEQ ID NO: 481 - DNA, 3102 bp, Rat
aagagctggaccataatccaagagcgcctgcagatggactccatggttatcaaaggccttgatccagacaccaactaccagtttgctgtgagagccatgaatgcctatggcttcagtctgcgcagccagcccagcaacaccatccgaactctgggtcctggggaggctggaagtggccgctatggacctgggtatatcaccgataccggcgtgagtgaggatgacgatgcatcagaagacgagctagatctggatgtctcctttgaggaggttaaaccacttcctgctaccaaagttgggaataagaagtccaagaagacttctgtctccaactcagagatggactccagacttgcccaacctacctcagcatctctccctgaaactacagtggctgtgccacccacgccagcccaacggaaggggaagaacagtgtggccgtgatgtcaaggctctttgacatgtcctgtgacgaaaccctctgttcagctgacagcttctgtgtcaatgactacgcctggggaggctcacgatgccattgcaacctgggcaaaggaggcgaggcctgctcagaagatatctttattcagtatccacagttctttggccactcctatgtaacctttgagcctctgaagaactcttatcaggcatttcagattactctggaattcagggcagaggcagaagatggcttactgctctactgtggggagagtgaacatgggagaggagacttcatgtccctggctctcatccgacgctccctccacttcaggtttaattgtggaactgggatggccatcatcataagtgagaccaaaatcaagcttggggcctggcactcggtgacactgtatagagatgggctgaacgggctgctgcagttgaacaatggcaccccagtaacaggccagtcccagggtcagtacagtaaaattaccttccggacacctctgtaccttggtggtgctcccagtgcttactggctggtcagagcgacggggacaaatcgtggcttccaaggctgtgtgcagtcacttgctgttaacgggaagaagattgacatgaggccctggccactggggaaagccctcaacggagctgatgttggggagtgcagcagtgggatctgtgatgaagcctcctgcatcaacgggggcacctgcgcagccatcaaggccgactcctacatctgcctctgtccccttgggttcagaggtcgacactgtgaagatgcatttaccctgaccattcctcagttcagagagtcgctgaggtcctacgctgccacgccctggcccctggagcctcagcactatctttctttcaccgagtttgagatcacatttcggccagactccggggatggggtccttttgtacagctacgacacaagcagcaaggacttcctgtccattattatggctgcaggccatgtggaattccgcttcgactgtggttctgggaccggagttctcaggagtgaggataccctcaccctaggccaatggcatgacctacgcgtgtctcgcacagcgaagaatgggatcttacaggtggacaagcagaaggtagtagaaggaatggcagagggaggcttcacccagattaagtgtaatacagacatttttattggcggagtcccaaattacgatgatgtcaagaagaactcgggtatcctccatccatttagtgggagcatccagaagatcatcctaaatgaccggaccatccatgtgaggcacgactttacatctggtgtgaatgtggagaacgcagcgcacccctgtgtgggggccccctgtgcccatgggggcagctgtaggcccaggaaggagggttatgagtgtgactgtcccttgggcttcgaaggcctgaactgccagaaagcgattacagaagccattgagatcccacagttcatcggtcggagttacctgacctatgacaacccaaatatcctcaagagggtgtccggatcaaggtcaaatgctttcatgaggtttaagacaaccgccaaggacggcctgttgctgtggaggggggacagccccatgagacctaacagcgacttcatttccctgggtcttcgggatggagccctggtgttcagctacaacctgggcagtggtgtggcttccattatggtgaatggttccttcagcgatggccggtggcaccgagtcaaggctgtcagggatggccagtctgggaaaattacggtggatgactatggagccagaacaggcaagtcacctggcatgatgaggcaacttaacatcaatggggctctgtatgtgggtggaatgaaggaaattgctctgcacacgaacagacagtacatgcgaggccttgtgggctgcatctcccatttcacattgtccaccgattaccacatttcccttgtggaagacgctgtggatgggaagaacatcaacacttgtggggctaagtaacaccagctggccttgcccaagggacattgacagcctctatcctgaaatcccaggggcccagagaccctgcctgatgctgcactcagaggtcttgaaatcaggtgtgtttactttcatcgaggacaaagtgcgccctggtgagagccaagactgaaggccctgagtggccttctctgctaaagccctgtggaccaaacccaatggactactgtggataggaagcattggactttgtcactcgacgtatagagtctgtgagagatggtatcagtgcacgctctggaaaaactctgctgtagctcaatggctgtgctgtattagagagagccagactgggtgagaaagagtgaatgagtgaatgagagagagagagagagagagagagagagagagcacagagataagcagagagagacagacacccctctgaataatattaaaatatttttgctcttccttgacttatgacgctagcagaatgactgtgtgaccctgaatttcatacttccaatcttggtctatggattgtgtagattaaccccttccatgcctcgctggctgactcaatgtgctctgtctagtccgtgaaataaaagtcagggggcaaattaaacatataataataaaaaaaaaaaaaaaaaa

SEQ ID NO: 482 - DNA, 441 bp, Rat
ggtgagagaggcccaaagggagagaaaggagaaagaggagagagagctgcaggtgatatggatttcacaatgattcgcctggtgaatggctctggcccacaccagggccgggtggaggtattccacgatcgtcgctggggcacagtgtgtgatgacggctgggacaagaaggatggggacgtggtgtgccgcatgctgggcttccacagtgtggaggaggtgcaccggacagctcgttttgggcaaggcacagggaggatctggatggatgatgtgaactgcaagggaactgagagctccatcttccactgccagttctccaaatggggcgtgacaaattgtgggcatgctgaggacgctggagtgacttgtactgccctctgaaagtggccacagcccaaggctagggcactgcctcagagccacattcctgtgtctctg

SEQ ID NO: 483 - DNA, 376 bp, Human
cagcctgcacagctgccacctggagcgcatcagccgcggcgccttccaggagcaaggtcacctgcgcagcctggtcctgggggacaactgcctctcagagaactacgaagagacggcagccgccctccacgccctgccgggcctgcggaggctggacttgtcaggaaacgccctgacggaggacatggcagcgctcatgctccagaacctctcctcgctgcggtccgtgtccctggcggggaacaccatcatgcggctggacgactccgtcttcgagggcctggagcgtctccgggagctggatctgcagaggaactacatcttcgagatcgagggcggcgctttcgacggcctggctgagctgaggcacctcaac

SEQ ID NO: 484 - DNA, 2580 bp, Rat
gcggtggctcctctgtgtcccacgtcctgaggggctcaggacaagaaaggagcccacccccagccagtatgcagccgccctggggcctggcgctccctctgctgctcccctgggtggcaggtggagtagggaccagcccacgggattattggttgccagcactggcacaccagcctggggtctgtcactacggaactaagacggcctgctgctatggctggaaaaggaacagcaaaggagtatgtgaagctgtgtgtgagcccagatgcaagtttggtgagtgtgtgggaccgaataaatgtagatgctttccaggatacaccgggaagacctgcagtcaagacgtgaatgagtgtgcattcaaaccccggccatgccagcacagatgtgtgaatacacacggtagctacaaatgcttttgcctcagcggccacatgcttctaccagacgccacatgttcaaactccaggacatgtgccagaataaactgccagtacagttgtgaagacacagcagaagggccacgatgtgtgtgtccatcctctggcctccgcctgggtccaaatggaagagtgtgcctagatatcgatgaatgtgcttctagcaaagcagtctgtccttccaatagaagatgtgtgaacacatttggaagctactactgcaaatgtcacattggttttgaactgaaatatatcagtcgccgatatgattgtgtagatataaatgagtgcactctgaatacccgtacgtgcagcccccatgccaattgcctcaatacccaaggatccttcaagtgcaaatgcaagcagggatacagggggaatggactgcagtgttctgtgattcctgaacattctgtgaaggaaatactcacagcacctgggaccatcaaagaccgaatcaagaagttactggctcacaagcacaccatgaagaaaaaggtgaagcttaaaaacgtcaccccaagacccaccagtacacgagcccctaaggtcaacttgccttacagctctgaggagggtgtttccagaggcagaaactctggtggggaacagaaaaggaaggaagagagaaagagaaagaggcttgaagaagagaaaagtgagaaagccctgaggaatgaggtggaacaggagcgacccctccgaggggatgtgttctcccctaaggtaaatgaagcagaggatttggatctggtctacatccaaagaaaagagctaaattccaaacaggagcacaaagcagacttaaacatttcagttgactgcagctttgatcttggggtctgtgattggaaacaggatagagaagatgattttgactggaatcctgcggatcgagacaatgatgtgggttactatatggcagtccctgcactggcagggcacaagaagaatattggccgattgaaacttctccttcccaacttgacaccccaaagcaacttctgtttgctctttgattaccggcttgctggggacaaagtaggaaaacttcgagtgttcgtgaaaaatagcaacaacgccctggcatgggaggagactaaaactgaggatggaaagtggaagacaggaaaagtccctttgtaccaaggaatcgacactaccaaaagtgtcatttttgaagcagagcgtggcaaaggcaaaactggagaaattgcagtggatggtgtcttactggtgtcaggcttgtgtccagatgactttttatctgaggagggttgaatgtcactgtccttctttatagcttcatatgtggctttttaaatgtcatttctctgtggtatctttgtatatcatatcctaggactcttccattttatagatacaagctgacaatgtgtaatgttccaacagaaatactatcataagatgccttttttttatcaaatgcactaagacttgccttatatatagtaccactgtgccttctcatttgtttctgaatttcccacattatatcacaaaatggggaaatgccagtccatctcctcctgcccagtatgtctgctcttcctacacgagttggtgaacttttctatataacatttgtagaataacagcaacagaaaaagataagtacagataaatggttaattgttggggctggggcaatggcctagcggttaagtgttcatttctccaggatcaatttccagcatccacatggtgggttgcaaccacctggaactccaattccagagaattcaatgcccttctggcttctgtggacattttcatatgtgtgatatacatgcataaactacatacacacacacacaccaatgaagtaaatcatttttttagattgcttaacttgtaaggtgcttcttggaaacaatgatattaaacatagatttgcgcctatgtggctcagcctgctccttcacagtcaagcttgcacatttaattttttataatcatatccaataaaccaccttgtgtcatagtacaataaaagggtatctttactgactctgtttacttctgtatataattctgcatattttattcttctcactattgaatactttgtaatcttaaaaattcttaaaaattgaaaaaaaaaaaaaaaaaaaaa

SEQ ID NO: 485 - DNA, 1274 bp, Mouse
tacgcttctgcttccgaacccactgagatttatagaacagaattgcaaggcttgtggataaatgacatcgttccaattggaagaatacaggagcccgcccatctagatttcatgtgcctacaaaatgaagtttacaaacaaacagagcaactggctgaactctcaaagggtgttcaagaagttgtgttgtccagtatcctgtccatgctctatgaaggtgacaggaaagttctgtatgacctgatgaacatgctggagttgaatcagttggggcatatggatggcccaggtggcaaaatcctggatgagctgcgaaaggattctagcaacccatgtgttgacctaaaggacctcattctttatctccttcaagctctgatggtgctgagcgatagccaactcaatctgctggcccagtctgtggagatggggatcctcccgcaccaagtagagctggtaaagagcatcttacagccaaacttcaagtatccctggaacattcccttcacagtccagcctcagcttcttgccccactccagggtgagggcttggccattacttatgaattgctggaggagtgtggtctgaagatggagctgaataatcccaggtcaacttgggatttggaagccaaaatgcccctgtctgctctctatggaagcctgtcatttttacagcaacttcggaaggctaactcttcctccaagcccagcctacgtcctggatacatttgatatattgcaccatgcatgttttaggccagtgggaataaagatgctatggctcctttttttttcttttttacgtattattgattcacaattatacaaataatatacttggatcagattctacctaccctccattgtttcttttaatccaccccttccaagttcctttttcctcaacaacttctcattcatcatttgtctgtttgtttgatgctatgctacgtttaattagggttgtttgcataagtgtgtgattattcatttgagcaagggtagccttccagaggctacctcctgccagcagcattgagagcctgtaggtgttttagggagggtgaggttctcctccattcttgtggaatgttggtgggctcgggcttgcttggtcttgtgcgggtacccattgccactttgagtttatgggtttagctattccatatccttaccacgtctaggaaacaggatgttgttatctgtcaaaaatacttaaatggtatgttaaataaagatttacacattttctctataaaaaaaaaaaaaaa

SEQ ID NO: 486 - DNA, 858 bp, Human
gtttcgtgccgttatttaaagaattctctccatgtttttgtatcgggaggtgccatcggcacttcctcccccgccctcctcgagtgccaagaaggtgttggaccagcccgcccttccctactggtgccccctcctccccggccaaggcgcctggacctggcgaggaccctgcccgccgagcggactgattcgcagagtctgtacatagtgtatattgctctacccggccgcacaccacgtcctgctctggcttttgccttcttgatgccagcctgctgcaacagaccctccccgcgcccctccccagcccatcttactgcaagcagcgtcctgaggagacagcggcacgttctagctgcgtctgcggccagcccgtgccagtggagtgggctccgcgttgctcattctctccgacaggttgtcagcctctgtccccgctgcacagggtcttgccccttctccggggcctgtgccagctcccttccctccccgttgtcctgtccccacagccattctgggagctggggaacctggtctcaaggcaggccctgcagttccacagaggtggcaggtcttgccctttggccaacagatttcttgtcctgccttctagatgcctctgagctccaaacccagggcagccatggcttctcatttacaccaacaggtttcagttccaacagaaaggtcggggtaggttcgtgcagagatggggctggcaggggggctatgggaggattattttaacagatcaagaaaatgaagccaaatcaagtgaattaaattcctcacaattattttctttccctgaggtttgattggcacagcagcaaaagttgaggccaccccacttgtgtc

SEQ ID NO: 487 - DNA, 2128 bp, Mouse
atgcctgtgtcctggttcctgctgtccttggcactgggccgaaaccctgtggtcgtctctctggagagactgatggagcctcaggacactgcacgctgctctctaggcctctcctgccacctctgggatggtgacgtgctctgcctgcctggaagcctccagtctgccccaggccctgtgctagtgcctacccgcctgcagacggagctggtgctgaggtgtccacagaagacagattgcgccctctgtgtccgtgtggtggtccacttggccgtgcatgggcactgggcagagcctgaagaagctggaaagtctgattcagaactccaggagtctaggaacgcctctctccaggcccaggtggtgctctccttccaggcctaccccatcgcccgctgtgccctgctggaggtccaggtgcccgctgacctggtgcagcctggtcagtccgtgggttctgcggtatttgactgtttcgaggctagtcttggggctgaggtacagatctggtcctacacgaagcccaggtaccagaaagagctcaacctcacacagcagctgcctgactgcaggggtcttgaagtccgggacagcatccagagctgctgggtcctgccctggctcaatgtgtctacagatggtgacaatgtccttctgacactggatgtctctgaggagcaggactttagcttcttactgtacctgcgtccagtcccggatgctctcaaatccttgtggtacaaaaacctgactggacctcagaacattactttaaaccacacagacctggttccctgcctctgcattcaggtgtggtcgctagagccagactctgagagggtcgaattctgccccttccgggaagatcccggtgcacacaggaacctctggcacatagccaggctgcgggtactgtccccaggggtatggcagctagatgcgccttgctgtctgccgggcaaggtaacactgtgctggcaggcaccagaccagagtccctgccagccacttgtgccaccagtgccccagaagaacgccactgtgaatgagccacaagatttccagttggtggcaggccaccccaacctctgtgtccaggtgagcacctgggagaaggttcagctgcaagcgtgcttgtgggctgactccttggggcccttcaaggatgatatgctgttagtggagatgaaaaccggcctcaacaacacatcagtctgtgccttggaacccagtggctgtacaccactgcccagcatggcctccacgagagctgctcgcctgggagaggagttgctgcaagacttccgatcacaccagtgtatgcagctgtggaacgatgacaacatgggatcgctatgggcctgccccatggacaagtacatccacaggcgctgggtcctagtatggctggcctgcctactcttggctgcggcgcttttcttcttcctccttctaaaaaaggaccgcaggaaagcggcccgtggctcccgcacggccttgctcctccactccgccgacggagcgggctacgagcgtctggtgggagcactggcgtccgcgttgagccagatgccactgcgcgtggccgtggacctgtggagccgccgcgagctgagcgcgcacggagccctagcctggttccaccaccagcgacgccgtatcctgcaggagggtggcgtggtaatccttctcttctcgcccgcggccgtggcgcagtgtcagcagtggctgcagctccagacagtggagcccgggccgcatgacgccctcgccgcctggctcagctgcgtgctacccgatttcctgcaaggccgggcgaccggccgctacgtcggggtctacttcgacgggctgctgcacccagactctgtgccctccccgttccgcgtcgccccgctcttctccctgccctcgcagctgccggctttcctggatgcactgcagggaggctgctccacttccgcggggcgacccgcggaccgggtggaacgagtgacccaggcgctgcggtccgccctggacagctgtacttctacctcggaagccccaggctgctgcgaggaatgggacctgggaccctgcactacactagaataaaagcccctacagtattcctaaaaaaaaaaaa

SEQ ID NO: 488 - protein, 95 aa, Rat; identical to SEQ ID NO: 378

SEQ ID NO: 489 - protein, 207 aa, Human [sequence omitted]

SEQ ID NO: 490 - protein, 81 aa, Human
MSQVQVILLTLVSQSVGIIGMSHCIKPVKSIYIKLDCRKRRDKTSLLFCPQGPRNPVSKAPHQLQCVPVSRVPTGTESSGT

SEQ ID NO: 491 - protein, 193 aa, Human [sequence omitted]

SEQ ID NO: 492 - protein, 104 aa, Human
MPPNPHLTLILITALWEAVVGGSLKPRRLRLECCTIAPLHSTAWATEGDPVSKKRETAVAIIVVRNNTERSLVLSAQLFLTVSLCRTPQSHTRTWTLMPSGGLT

SEQ ID NO: 493 - protein, 254 aa, Human
MILLIIVYWDSAGAAHFYLHTSFSRPHTGPPLPTPGPDRDRELTADSDVDEFLDKFLSAGVKQSDLPRKETEQPPAPGSMEESVRGYDWSPRDARRSPDQGRQQAERRSVLRGFCANSSLAFPTKERAFDDIPNSELSHLIVDDRHGAIYCYVPKVACTNWKRVMIVLSGSLLHRGAPYRDPLRIPREHVHNASAHLTFNKFWRRYGKLSRHLMKVKLKKYTKFLFVRDPFVRLISAFRSKFELENEEFYRKFA

SEQ ID NO: 494 - protein, 215 aa, Rat
MRPVVPIHVFSSEDSPPRDAPSTSSVAPASRAVHTPPLGPILKKTAGLGFCAVFLYFITALIFPAISTNIQPMHKGTGSPWTSKFYVPLTVFLLFNFADLCGRQVTAWIQVPGPRSKLLPILAVSRVCLVPLFLLCNYQPRSHLTLVLFQSDIYPILFTCLLGLSNGYLSTLVLMYGPKIVPRELAEATSVVMLFYMSLGLMLGSACAALLEHFI

SEQ ID NO: 495 - protein, 91 aa, Human
MIQPSLSVLCGLGCAFLWATSSFAAVSPPACAPATSPSPVVHLRSTQPGQSCFVLLHRLGLPCVLSSSGSFSSPHLFCFLPVLVSPCALGP

SEQ ID NO: 496 - protein, 224 aa, Human
MAAACGPGAAGYCLLLGLHLFLLTAGPALGWNDPDRMLLRDVKALTLHYDRYTTSRRLDPIPQLKCVGGTAGCDSYTPKVIQCQNKGWDGYDVQWECKTDLDIAYKFGKTVVSCEGYESSEDQYVLRGSCGLEYNLDYTELGLQKLKESGKQHGFASFSDYYYKWSSADSCNMSGLITIVVLLGIAFVVYKLFLSDGQYSPPPYSEYPPFSHRYQRFTNSAGPP

SEQ ID NO: 497 - protein, 766 aa, Rat
MLLLLLLLLPACPLLSARMFPGNAGGELVTPHWVLDGKTWLKVTLKEQISKPDSGLVALKAEGQDLLLELEKNHRLLAPGYTETYYSRDGQPIVLSPNHTDHCHYQGCVRGFRESWVVLSTCSGMSGLIVLSSKVSYYLHPWMPGDTKDFPTHKIFRVEQLFTWRGARKDKNSQFKAGMARLPHVPHRRMRREARRSPKYLELYIVADHALFLLQRQNLNHTRQRLLEIANCVDQILRTLDIQLVLTGLEVWTEQDHSRITQDANETLWAFLQWRRGLWVRRPHDSTQLLTGRTFQGTTVGLAPVEGMCHAESSGGVSTDHSELPIGTAATMAHEIGHSLGLHHDPEGCCMEADAEQGGCVMEAATGHPFPRVFSACSRRQLRTFFRKGGGACLSNVSAPGLLVLPSRCGNGFVEAEEECDCGSGQKRPDPCCFAHNCSLRAGAQCAQGDCCARCLLKPAGTPCRPAANDCDLPEFCTGTSPHCPADVYLLDGSPCAEGRGYCLDGWCPTLEKQCQQLWGPGSQPAPEPCFQQMNSVGNSQGNCGQDSKGSFLPCTQRDAQCGKLLCQGGKPNPLVPHVVTVDSTILLEGRQVLCRGAFVLPDTHLDQLGLGLVEPGTRCGPRMVCQERHCQNATSQELERCSSGCHNRGVCNSNRNCHCAAGWAPPFCDKPGLGGSVDSGPAQSANPDAFPLAMLLSFLLPLLPGAGLAWCYYQLPTLCQQPGRCCRRDALCNRDQPLGSVHPVEFGSIITGEPSPPNPEESELT

SEQ ID NO: 498 - protein, 609 aa, Rat
MWITALLLLVLLLVVVHRVYVGLFTGSSPNPFAEDVKRPPEPLVTDKEARKKVLKQAFSVSRVPEKLDAVVIGSGIGGLASAAILAKAGKRVLVLEQHTKAGGCCHTFGENGLEFDTGIHYIGRMREGNIGRFILDQITEGQLDWAPMASPFDLMILEGPNGRKEFPMYSGRKEYIQGLKEKFPKEEAVIDKYMELVKVVAHGVSHAILLKFLPLPLTQLLNKFGLLTRFSPFCRASTQSLAEVLKQLGASPELQAVLSYIFPTYGVTPSHTTFSLHALLVDHYIQGAYYPRGGSSEIAFHTIPLIQRAGGAVLTRATVQSVLLDSAGRACGVSVKKGQELVNIYCPVVISNAGMFNTYQHLLPESVRYLPDVKKQLTMVKPGLSMLSIFICLKGTKEELKLQSTNYYVYFDTDMDKAMERYVSMPKEKAPEHIPLLFIAFPSSKDPTWEDRFPDRSTMTVLVPTAFEWFEEWQEEPKGKRGVDYETLKNTFLEASMSVIMKLFPQLEGKVESVTGGSPLTNQYYLAAHRGATYGADHDLARLHPHAMASLRAQTPIPNLYLTGQDIFTCGLMGALQGALLCSSAILKRNLYSDLQALGSKVRAQKKKK

SEQ ID NO: 499 - protein, 559 aa, Rat
FGRENFYEVQVPEDTPIGSSIITISAKDLDMGNYGKISYSFLHATEDVRKTFEINPTSGEVNLRSLLDFEVIQSYSVTIQATDGGGLSAKCTLSVKVLDINDNAPEVIISSVTKTIPENASETLITLFSVRDQDSGDNGRILCSIPDDLPFILKPTFKNFFTLLSEKALDRESRAEYNITITVSDLGTPRLTTQHTITVQVSDINDNAPAFTQTSYTMFVHENNSPALHIGTISATDSDSGSNAHITYSLMPPRDPQLALDSLISINADNGQLFALRALDYEVLQAFEFRVGATDRGSPALSSQALVRVVVLDDNDNAPFVLYPLQNASAPYTELLPRAAEPGYLVTKVVAVDRDSGQNAWLSFQLLKATEPGLFSVWAHNGEVRTSRLLSERDAPKHKLLLMVKDNGDPPRSASVMLHVLVVDGFSQPYLPLPEVAHNPAHDEDTLTLYLVIALASVSSLFLLSVLLFVGVRLCKKARAASLGGCSVPEGHFPGHLVDVTGTGTLSQNYQYEVCLTGSTGTNEFKFLKPVMPSLQLQDPDSNMLVKENFRNSLGFNIQ

SEQ ID NO: 500 - protein, 545 aa, Mouse
SLHFEPSKINIFHKDCKRNGRDATCLAAFLCFGPIFLAPHFHTATVGIRYNATMDERRYMPRAHLDEGADQFTNRAVLLSSGQEHCQRINFHVLDTADYVKPVAFSVEYSLEDPDHGPMLDNGWPTTLRVSVPFWNGCNEDEHCVPDLVLDARSDLPTAMEYCQQVLRRPAQDCSSYTLSFDTTVFIIESTRRRVAVEATLENRGENAYSAVLNISQSENLQFASLIQKDDSDNSIECVNEERRLHKKVCNVSYPFFRAKAKVAFRLDFEFSKSVFLHHLQIHLGAGSDSHEQDSTADDNTALLRFHLKYEADVLFTRSSSLSHFEVKANSSLESYDGIGPPFNCVFKVQNLGFFPIHGVMMKITVPIATRGGNRLLMLKDFFTDQVNTSCNIWGNSTEYRSTPTEEDLSHAPQRNHSNSDVVSIICNVRLAPNQETSFYLVGNLWLMSLKALKYRSMKITVNAALQRQFHSPFIFREEDPSRQVTFEISKQEDWQVPIWIIVGSSLGGLLLLALLVLALWKLGFFKSAKRKREPSLGPVPKELE

SEQ ID NO: 501 - protein, 696 aa, Rat
GAPMYFSEGRERGKVYVYNLRQNRFVFNGTLKDSHSYQNARFGSCIASVQDLNQDSYNDVVVGAPLEDSHRGAIYIFHGFQTNILKKPVQRISASELAPGLQHFGCSIHGQLDLNEDGLVDLAVGALGNAVVLWARPVVQINASLHFEPSKINIFHKDCKRNGRDATCLAAFLCFGPIFLAPHFHTATVGIRYNATMDERRYMPRAHLDEGADQFTNRAVLLSSGQEHCQRINFHVLDTADYVKPVAFSVEYSLEDPDHGPMLDNGWPTTLRVSVPFWNGCNEDEHCVPDLVLDARSDLPTAMEYCQQVLRRPAQDCSSYTLSFDTTVFIIESTRRRVAVEATLENRGENAYSAVLNISQSENLQFASLIQKDDSDNSIECVNEERRLHKKVCNVSYPFFRAKAKVAFRLDFEFSKSVFLHHLQIHLGAGSDSHEQDSTADDNTALLRFHLKYEADVLFTRSSSLSHFEVKANSSLESYDGIGPPFNCVFKVQNLGFFPIHGVMMKITVPIATRGGNRLLMLKDFFTDQVNTSCNIWGNSTEYRSTPTEEDLSHAPQRNHSNSDVVSIICNVRLAPNQETSFYLVGNLWLMSLKALKYRSMKITVNAALQRQFHSPFIFREEDPSRQVTFEISKQEDWQVPIWIIVGSSLGGLLLLALLVLALGSLVSLKVPSARGSPAWAPSPKSWSEDPEEASS

SEQ ID NO: 502 - protein, 242 aa, Rat
GHCDCQAGYGGEACGQCGLGYFEAERNSSHLVCSACFGPCARCTGPEESHCLQCRKGWALHHLKCVDIDECGTEQATCGADQFCVNTEGSYECRDCAKACLGCMGAGPGRCKKCSRGYQQVGSKCLDVDECETVVCPGENEQCENTEGSYRCVCAEGFRQEDGICVKEQIPESAGFFAEMTEDEMVVLQQMFFGVIICALATLAAKGDLVFTAIFIGAVAAMTGYWLSERSDRVLEGFIKGR

SEQ ID NO: 503 - protein, 819 aa, Rat
KSWTIIQERLQMDSMVIKGLDPDTNYQFAVRAMNAYGFSLRSQPSNTIRTLGPGEAGSGRYGPGYITDTGVSEDDDASEDELDLDVSFEEVKPLPATKVGNKKSKKTSVSNSEMDSRLAQPTSASLPETTVAVPPTPAQRKGKNSVAVMSRLFDMSCDETLCSADSFCVNDYAWGGSRCHCNLGKGGEACSEDIFIQYPQFFGHSYVTFEPLKNSYQAFQITLEFRAEAEDGLLLYCGESEHGRGDFMSLALIRRSLHFRFNCGTGMAIIISETKIKLGAWHSVTLYRDGLNGLLQLNNGTPVTGQSQGQYSKITFRTPLYLGGAPSAYWLVRATGTNRGFQGCVQSLAVNGKKIDMRPWPLGKALNGADVGECSSGICDEASCINGGTCAAIKADSYICLCPLGFRGRHCEDAFTLTIPQFRESLRSYAATPWPLEPQHYLSFTEFEITFRPDSGDGVLLYSYDTSSKDFLSIIMAAGHVEFRFDCGSGTGVLRSEDTLTLGQWHDLRVSRTAKNGILQVDKQKVVEGMAEGGFTQIKCNTDIFIGGVPNYDDVKKNSGILHPFSGSIQKIILNDRTIHVRHDFTSGVNVENAAHPCVGAPCAHGGSCRPRKEGYECDCPLGFEGLNCQKAITEAIEIPQFIGRSYLTYDNPNILKRVSGSRSNAFMRFKTTAKDGLLLWRGDSPMRPNSDFISLGLRDGALVFSYNLGSGVASIMVNGSFSDGRWHRVKAVRDGQSGKITVDDYGARTGKSPGMMRQLNINGALYVGGMKEIALHTNRQYMRGLVGCISHFTLSTDYHISLVEDAVDGKNINTCGAK

SEQ ID NO: 504 - protein, 127 aa, Rat
GERGPKGEKGERGERAAGDMDFTMIRLVNGSGPHQGRVEVFHDRRWGTVCDDGWDKKDGDVVCRMLGFHSVEEVHRTARFGQGTGRIWMDDVNCKGTESSIFHCQFSKWGVTNCGHAEDAGVTCTAL

SEQ ID NO: 505 - protein, 125 aa, Human
SLHSCHLERISRGAFQEQGHLRSLVLGDNCLSENYEETAAALHALPGLRRLDLSGNALTEDMAALMLQNLSSLRSVSLAGNTIMRLDDSVFEGLERLRELDLQRNYIFEIEGGAFDGLAELRHLN

SEQ ID NO: 506 - protein, 551 aa, Rat
MQPPWGLALPLLLPWVAGGVGTSPRDYWLPALAHQPGVCHYGTKTACCYGWKRNSKGVCEAVCEPRCKFGECVGPNKCRCFPGYTGKTCSQDVNECAFKPRPCQHRCVNTHGSYKCFCLSGHMLLPDATCSNSRTCARINCQYSCEDTAEGPRCVCPSSGLRLGPNGRVCLDIDECASSKAVCPSNRRCVNTFGSYYCKCHIGFELKYISRRYDCVDINECTLNTRTCSPHANCLNTQGSFKCKCKQGYRGNGLQCSVIPEHSVKEILTAPGTIKDRIKKLLAHKHTMKKKVKLKNVTPRPTSTRAPKVNLPYSSEEGVSRGRNSGGEQKRKEERKRKRLEEEKSEKALRNEVEQERPLRGDVFSPKVNEAEDLDLVYIQRKELNSKQEHKADLNISVDCSFDLGVCDWKQDREDDFDWNPADRDNDVGYYMAVPALAGHKKNIGRLKLLLPNLTPQSNFCLLFDYRLAGDKVGKLRVFVKNSNNALAWEETKTEDGKWKTGKVPLYQGIDTTKSVIFEAERGKGKTGEIAVDGVLLVSGLCPDDFLSEEG

SEQ ID NO: 507 - protein, 244 aa, Mouse
YASASEPTEIYRTELQGLWINDIVPIGRIQEPAHLDFMCLQNEVYKQTEQLAELSKGVQEVVLSSILSMLYEGDRKVLYDLMNMLELNQLGHMDGPGGKILDELRKDSSNPCVDLKDLILYLLQALMVLSDSQLNLLAQSVEMGILPHQVELVKSILQPNFKYPWNIPFTVQPQLLAPLQGEGLAITYELLEECGLKMELNNPRSTWDLEAKMPLSALYGSLSFLQQLRKANSSSKPSLRPGYI

SEQ ID NO: 508 - protein, 248 aa, Human
VSCRYLKNSLHVFVSGGAIGTSSPALLECQEGVGPARPSLLVPPPPRPRRLDLARTLPAERTDSQSLYIVYIALPGRTPRPALAFAFLMPACCNRPSPRPSPAHLTASSVLRRQRHVLAASAASPCQWSGLRVAHSLRQVVSLCPRCTGSCPFSGACASSLPSPLSCPHSHSGSWGTWSQGRPCSSTEVAGLALWPTDFLSCLLDASELQTQGSHGFSFTPTGFSSNRKVGVGSCRDGAGRGAMGGLF

SEQ ID NO: 509 - protein, 698 aa, Mouse
MPVSWFLLSLALGRNPVVVSLERLMEPQDTARCSLGLSCHLWDGDVLCLPGSLQSAPGPVLVPTRLQTELVLRCPQKTDCALCVRVVVHLAVHGHWAEPEEAGKSDSELQESRNASLQAQVVLSFQAYPIARCALLEVQVPADLVQPGQSVGSAVFDCFEASLGAEVQIWSYTKPRYQKELNLTQQLPDCRGLEVRDSIQSCWVLPWLNVSTDGDNVLLTLDVSEEQDFSFLLYLRPVPDALKSLWYKNLTGPQNITLNHTDLVPCLCIQVWSLEPDSERVEFCPFREDPGAHRNLWHIARLRVLSPGVWQLDAPCCLPGKVTLCWQAPDQSPCQPLVPPVPQKNATVNEPQDFQLVAGHPNLCVQVSTWEKVQLQACLWADSLGPFKDDMLLVEMKTGLNNTSVCALEPSGCTPLPSMASTRAARLGEELLQDFRSHQCMQLWNDDNMGSLWACPMDKYIHRRWVLVWLACLLLAAALFFFLLLKKDRRKAARGSRTALLLHSADGAGYERLVGALASALSQMPLRVAVDLWSRRELSAHGALAWFHHQRRRILQEGGVVILLFSPAAVAQCQQWLQLQTVEPGPHDALAAWLSCVLPDFLQGRATGRYVGVYFDGLLHPDSVPSPFRVAPLFSLPSQLPAFLDALQGGCSTSAGRPADRVERVTQALRSALDSCTSTSEAPGCCEEWDLGPCTTLE

SEQ ID NO: 510 - DNA, 1700 bp, Rat
ccttttgtggcacacccagggcccagttacttctcaggttcgagtctaaactctcagccgtagacgttgtagacgtcggggttccagctccatctttgcacacataatccaggaagccgctagctctcgatgtcttctgtcaagttatggctcaatggtgcgtcatcgatctctctcgtgggctctgaagaactggagaacctaggatttgtgggcaaaggcgggttcggagccgtgttccgggcacgccacacagcatggaaccttgatgtagcagtcaagatcgtgaactcgaagaagatatccagggaggtgaaggctatggtgaatcttcgtcatgagaacgtgctgctcctgctgggggtcactgagaacctcgagtgggactacgtgtacgggccggctctggtgacaggattcatggagaacggctccctctcagggctgctgcaaccttcatgccctcggccctggcctctcctctgtcgcctgctagaggaagtggtgctggggatgtgctacctacacagcttgaacccttcgctactgcaccgggacctcaagccctccaatgttctgctggatccagagctccacgccaagttagcagactttggcctgtccacatttcagggagggtcacagtcagggtcagggtcaggatcgagagattctgggggcaccctagcttacttggccccagagctgttggataatgacggaaaggcttctaaagcaagtgatgtttacagttttggggtcctcgtgtggacagtgctggctggaagagaagctgaggtggtagacaagacctcactaattcgtggagcagtgtgtaacaggcagaggcgacctccattgacagagctgcctccggacagccctgagactcctggcttagaaggactgaaggagttaatgacgcattgctggagttctgagcctaaagacaggccatccttccaagactgtgaatcaaaaaccaataatgtttacatcctggtacaggacaaggtagatgctgctgtctccaaggtaaagcattatctgtctcagtacagaagcagtgacacaaagttgtctgccagagagtccagccaaaaaggtacagaggtggattgccccagggaaaccatagtttatgaaatgctggaccgcctgcatctggaggagccctctggatcagttcctgaaagactcacaagtcttactgagaggagaggaaaggaagcatcatttgggcatgccacaccagcagggacatcatctgacaccttggctggcactccccaaattccacatactttaccctccagaggcacaacacctaggccagcctttactgagactccaggtcctgacccccaaaggaatcagggagatggaagaaacagcaatccttggtacacctggaacgcaccaaatccaatgacagggctacagtctattgtcttaaacaactgttctgaagtgcagattggacaacacaactgcatgtcagtacaaccgagaactgcctttcccaagaaggagccagcacagttcggcaggggtaggggctggtagcccgtccacgtccacgagtagacttcggagaggacctgcaagtgcctgaagcaggaaatacaccattcaggcagccagtataaatagagtgaaaataaaagcactttctaagcaaaaaaaaaaaaaaaaaaaaa

SEQ ID NO: 511 - DNA, 2538 bp, Rat
ctggaggggaaagtactttcgtgccgggtggtagtagcgggtggtggtagcttggtgtagaagcttgagccatgcgtctcacagctgccggccgcctcctcggggaagctcgttctgccccgcccgccccgccctcctctcttcaccccacctcataggctcccaggcgcttctgcttggcttgagcgccgaacgtcgacttcccagcagtccccgcgccgtctccttggcgacgatgttaaacaaccacaccggtccaagctgtgagcttcaggctgaggcttggcagggcgccgccaactggggacctgtgaagttgcttttagacatgatctgtggagtcctcaggattctggcatcaatcaacacttcctgttcgacttttggaccgtcagctcggctgcccgactgttgtttctgtgagtgaacaagccagtttttatcttgtttggagcaatgctgaaattccaagagactgctaagtgtggacccacagccattcctgtgtacccacccactgtgattgcaagaagatacgttctccaacagaagcttggcagcgggagttttggaactgtctatctggtgtcagacaagaaagccaagcatggagaggaactaaaagtactgaaggaaatctctgttggagaattaaatccaaatgaaagtgtgcaggccagtatggaagcccagctcctgtccacgctaaaccatccggccatcgtcaggttccacgcaagcttcatggagcagggtacattttgcattatcacggagtactgtgagggccgagatctggactataaaatccaggaatataaagaagctgggaaaatctttcctgacaatcagatagtggaatggtttatccagttgctgcttggagttgattacatgcatgagaggaggatacttcatcgagacttgaaatcaaagaatatatttctgaaaaataatctacccaaaattggggactttggagtttctcggctgctgatgggttcatgtgagctggctacaactctaaccgggactccccattatatgagtccagaggccctgaagcaccaaggctgtgatgccaagtctgacatctggtcactggcatgcattttatacgagatgtgttgcatggatcatgcgttttctggctccaatttcttgtctgtggttttgaatatcgttgaaggcaacacgccttcactccctgacagatacccacgagaactaaacatcatcatgtcacgcatgttgaacaagagtccctccctgagaccgtcggctgcagagattttaaaagccccttatgtggaagagtgccttcagcagctgatgtataaacatccagaggcgacactggaagacaagaggaactcagcctgtcagaaggaggctgcccatgcagttaacgccataaagattactgaaggaagaagatataaagaaaataacaaaagggccaaagaactaagatcccagaactttgggtctgtgagtgcccatgtgctccaggaattagatgaactgactctggagagcctgtctcaacctcagtcccttccttgcctgaacctcgatgaacttgagcccagtttagaaggcaccattgttgacctcggacattatgagatcccagaagacccgcttgttgctgaacaatattatgctgatgtatttgattcctgttctgaagacagtggggagcaggaggaagaaatggcattttcagaagcagggggagacatgagagaggagggatccccacctacatacagaacaaaccaacaggtaccccctcccgctctggccagaagagatgtagctgtccgcggtgctgaacggattctggactcaggctaagaaagcgcagagggagcgagcggtcttgaacctggagttggggtcaggttgctcaggactactagggtctttctaatggcttgatgtaaaatcttttctttcaatgggcaggggcaggtagaactatgagactctgatcaggaccctgtttagaggggaggggctaggctagtcagtgcaggagagcagattcacacacactgcagtgcctgcttgctgaggagggcttccatatgcccagtaagtgccgaaagtctctctcacaggcggagtggtttttttgtttgtttgtttttttgatttttatcattttccagcctataatcagattttggtttgttttaaaattttgatgtaagtacagatttataaagactgattccattctggagttaaaatttggaagttcgaatgttaggaaatgttctttatagctttgtgcagcctctgaggagctctcatcacatgctgcactgggtctctctgcatagatgctctagtcgtagaacttcttaattagaaagactgagctagagtaggtctaataagataagaaatggccctgctttgcccctttccttttgatttttggagttgaaataaagttgtatacaagcaaaaaaaaaaaaaaaaaaaaaaaaaaaaaaaaaaaaaaaaaaaaaaaaaaaaaaaaaaaaa

SEQ ID NO: 512 - protein, 478 aa, Rat
MSSVKLWLNGASSISLVGSEELENLGFVGKGGFGAVFRARHTAWNLDVAVKIVNSKKISREVKAMVNLRHENVLLLLGVTENLEWDYVYGPALVTGFMENGSLSGLLQPSCPRPWPLLCRLLEEVVLGMCYLHSLNPSLLHRDLKPSNVLLDPELHAKLADFGLSTFQGGSQSGSGSGSRDSGGTLAYLAPELLDNDGKASKASDVYSFGVLVWTVLAGREAEVVDKTSLIRGAVCNRQRRPPLTELPPDSPETPGLEGLKELMTHCWSSEPKDRPSFQDCESKTNNVYILVQDKVDAAVSKVKHYLSQYRSSDTKLSARESSQKGTEVDCPRETIVYEMLDRLHLEEPSGSVPERLTSLTERRGKEASFGHATPAGTSSDTLAGTPQIPHTLPSRGTTPRPAFTETPGPDPQRNQGDGRNSNPWYTWNAPNPMTGLQSIVLNNCSEVQIGQHNCMSVQPRTAFPKKEPAQFGRGRGW

SEQ ID NO: 513 - protein, 467 aa, Rat
MLKFQETAKCGPTAIPVYPPTVIARRYVLQQKLGSGSFGTVYLVSDKKAKHGEELKVLKEISVGELNPNESVQASMEAQLLSTLNHPAIVRFHASFMEQGTFCIITEYCEGRDLDYKIQEYKEAGKIFPDNQIVEWFIQLLLGVDYMHERRILHRDLKSKNIFLKNNLPKIGDFGVSRLLMGSCELATTLTGTPHYMSPEALKHQGCDAKSDIWSLACILYEMCCMDHAFSGSNFLSVVLNIVEGNTPSLPDRYPRELNIIMSRMLNKSPSLRPSAAEILKAPYVEECLQQLMYKHPEATLEDKRNSACQKEAAHAVNAIKITEGRRYKENNKRAKELRSQNFGSVSAHVLQELDELTLESLSQPQSLPCLNLDELEPSLEGTIVDLGHYEIPEDPLVAEQYYADVFDSCSEDSGEQEEEMAFSEAGGDMREEGSPPTYRTNQQVPPPALARRDVAVRGAERILDSG

SEQ ID NO: 514 - DNA, 3380 bp, Rat
ggcgcacccatgtacttcagcgagggccgagagagaggcaaggtgtatgtctacaacctgagacagaaccggtttgtttttaatggcactctgaaggattcccacagctaccagaacgcccggttcgggtcatgcattgcctccgttcaagacctcaaccaagattcctacaatgacgtggtggtgggggcccctctggaggacagccacagaggggccatctacatcttccatggcttccaaaccaacatcctgaagaagcccgtgcagagaatatcagcctcagagctggctcccggcttgcagcattttggctgcagcatccacggacaactggacctcaatgaggacgggcttgtggacctagcagtgggcgccctgggcaacgctgtggttttgtgggcgcgtcccgtagttcagatcaacgccagcctccactttgagccttccaagatcaacatcttccacaaggactgcaagcgcaatggcagggatgccacctgcctggctgccttcctctgcttcggacctatcttcctggcaccccacttccacacagcaaccgtcggcatcaggtacaatgcaaccatggatgagagacggtatatgccacgggcacatctggatgagggtgcagaccagttcaccaacagggctgtcctactctcttctggtcaggaacactgtcaaaggatcaacttccacgtcctggacactgccgactacgtgaagccagtggccttctctgtggaatattccctagaggaccctgaccatggccccatgctggacaacggctggcccactacactcagagtgtcggtgcccttctggaatggctgtaatgaggatgaacactgtgtccctgaccttgtactggatgctcgaagtgatctgcccactgccatggagtactgccaacaggtgctgaggaggccggcccaggactgctccagttacacactgtccttcgacaccactgtcttcatcatagagagcacacggcgccgggtagcagtagaggccacgctggagaacagaggagagaatgcttacagtgcagtcctcaatatctcccagtcagagaacctgcagtttgccagcctgatccagaaggatgactcagacaacagcatcgagtgtgtgaatgaggagaggcggctacacaagaaagtctgcaacgtcagttaccccttcttcagggccaaggccaaggtggctttccggctggatttcgagttcagcaagtctgtgttcctgcaccatcttcagatccatctgggtgccggcagcgacagtcacgagcaggacagcaccgcagatgacaacacggccctccttcgcttccacctcaaatatgaagcagacgtcctctttaccagaagcagcagcctgagccacttcgaggtcaaggccaacagctcgctggagagctatgatggcatcgggcctccattcaactgtgttttcaaggtgcagaacctgggctttttccccatccacggggtgatgatgaagattactgtgcccattgccaccaggggtggcaaccgcctgctgatgctgaaggacttcttcacagaccaggtcaacacatcctgtaacatctgggggaacagcacagagtaccggagtaccccaactgaggaagacctgagccatgccccacagaggaatcacagcaactccgatgtggtctccatcatctgcaatgtgagactagcccccaaccaggagaccagcttctacctggtggggaacctgtggctgatgtccctgaaagcactcaagtacaggtctatgaagatcacagtcaacgccgccttgcagaggcagttccacagccccttcatcttccgagaggaggaccccagtcgccaggtcacgtttgagatctccaagcaagaagactggcaggtccccatctggatcatcgtgggcagctctctgggaggcctcttgctgctggccctgctggtcctggcactgtggaagcttggtttctttaaaagtgccaagcgcaagagggagcccagcctgggccccgtccccaaagagctggagtgaggatccagaggaagcttcaagttgatgggggccagacaccagtccaggggtgtgtgggcccaggcctgtggcctcacagagctggagcaaagaggacacccgtggacttttgcattgagctcgtctctggaacgatggtaactgatccctgtgggatggacctcaagcccgtgtccagagcaacttctctactagaggttatgacgcttccagtacagatccctaaagactaaaagggacccttcgaagccttcccccaaggctccgtggaggcaatctgctgccccaaacactaaggtgctagggttgtttttatcttgcccacttctgaagaaacgcaaggggaagctagcaaatacacgcccactgtacacgccctatctagacctagagtttcaggactccaaggcccgcagcataacatccccacctctcacccctgctcttggttcccaagcacagacatcccttctccatagatagatcccaaagatctccatgagtgaacgagagttgtgtggcttgatatgacagctgcaggccaatggtggaaacgcatccagggactgtgccagatggtcaggtgggaaccaggatgctgggtacctccggaacatcggaacatcggaaagcggtagagctctccagcagtaaccaccacccactcactcctgctctcctgcctcccccgcagctcctctcagcagctttggttgctaggcaactcatgctaggaagtctgaagatgataaaaatctgtggctctccatacccacttgtctgacaactgcagcttgtccctggcaggcgcactgtggttggaagcctctgttctttgcatcacacacaaacacacacacacacacacacacacacacatacacacacgcccccgtgcgtgcacacacacacgcgcacacacgcatgcatgcatgcacacgcactcacgtgcacccatatactcatacacctcccaggcactaatgcgtgggggaagggctcctgtggaggcgctgtacagaggccttcttggcatgcactgaacaaatcccatgcaaggccactcagaaccttaaacctcagaggcagataggcatctcactggccagctctcgggacaagccccaaggacaaggggcatgtcggatgcccagcagagtaatttatgccttaaccctttgttgagatggaaatcgtcagatcaatgttcccttgtcatctgtttcatctgaacaatgtcatctgttcccctgtgcagtacgacctttactgtcagaaatatatttaagaaaatgttcaaaaaaaaaaaaaaa

SEQ ID NO: 515 - DNA, 1183 bp, Rat; identical to SEQ ID NO: 480

SEQ ID NO: 516 - DNA, 1858 bp, Rat
ggctgcagctgctgcggcggcactgacaggacacgagctctatgcctttccggctgcttatcccgctcggcctcgtgtgcgtgctgctgcccctgcaccatggtgcgccaggccccgaaggcaccgcgcccgaccccgcccactacagggagcgagtcaaggccatgttctaccacgcctacgacagttacctggaaaatgcctttccctacgatgagctgagacctctcacctgtgacgggcacgacacctggggcagtttttctctgacactgattgatgccctggacaccttgctgattttggggaatacctctgaattccaaagagtggtggaggttctccaggacaacgtggactttgatatcgacgtcaatgcctctgtgttcgaaaccaacatccgagtggtaggaggactcctttctgctcacctcttgtcaaagaaggctggtgtggaggtggaagctggatggccttgttctggacctctcctcaggatggcggaggaagcagcccgaaaactcctcccagcgtttcagacccccacgggcatgccctatggaactgtgaacctgcttcatggcgtgaaccctggagagactcctgttacctgtacagcagggattgggaccttcattgtggaatttgctaccctgagcagcctcaccggtgaccctgtgtttgaagatgtggccagagtggccctgatgcgcctctgggagagccggtcagatattgggctggtcggcaatcacatcgatgtgctcactggcaaatgggtggctcaggacgcaggcatcggggctggtgtggattcctattttgagtacctggtaaaaggagccatcctccttcaggataagaagctcatggccatgtttctagagtacaacaaagccatccggaattacacgcacttcgatgactggtacctctgggtgcagatgtacaaggggaccgtgtccatgcctgtcttccagtccttggaggcctactggcctggtcttcagagccttattggggatattgacaatgccatgagaaccttcctcaactactacactgtatggaagcagtttggggggctgccagaattctacaacattcctcagggatacacagtggagaagcgagaaggctacccactccgaccggagctcatcgagagcgcaatgtacctctaccgtgccacaggggatcccactctcttagaactggggagagatgctgtggagtccattgagaaaatcagcaaggtggagtgcgggttcgccacaatcaaggacctccgggatcacaaacttgacaaccgcatggagtctttcttcctggccgagactgtgaaatacctctaccttctgtttcacccaaacaacttcatccacaacaatggctccacttttgactctgtgatgaccccccatggggagtgcatcctgggagctgggggctacatcttcaacacggaagctcaccccatcgaccctgccgccttgcactgttgccggaggctgaaggaagagcagtgggaagtggaggacttgataaaggagttctactctctcagacagagcaggtcaagagctcagagaaagacagtgagttcggggccctgggagcccccggcagggccaggcacactctcctcacctgaaaaccagcccagggagaagcagcctgccaggcagagagccccgctcctcagctgccccagccagcccttcacttctaaactggccctgctaggccaggttttcctagactcctcataaccactggataatttttttaatttttatttttttgagactgagctataataataaatctgcttttagctatcaaaaaaaaaaaaaaa

SEQ ID NO: 517 - DNA, 1376 bp, Rat
aggaaaattaagaacaagatctctgcccaggagagccgccgcaaaaagaaggagtatgtggagtgtctagagaagaaggtggagacatatacatcagagaacaatgaactgtggaagaaggtggaaaccctagagactgccaacaggaccctgctccagcagctgcagaaactccagactctggtcaccagcaagatctccagaccttacaagatggcggccacacagactggcacttgcctcatggtggcagccttgtgctttgttctggtgctgggctcacttgcgccctgccttcctgcattctcttctggctcaaagactgtgaaagaagaccccgtcgcagctgacagtgtctacgcagccagtcagatgccttcccgaagcctgctgttttatgatgatggggcaggctcctgggaagatggccaccgaggtgctctactgcctgtggagcccccagaaggctgggagctcaaaccggggggaccagcagagccgaggccccaggaccacctccgacatgaccatgcggacagcatccacgagacaaccaagtacttgagagagacctggccagaggataccgaggacaatggcgccagccccaatttctcccaccccaaggagtggttccacgacagggatctgggccccaacaccaccatcaaactctcctaggccactccgagacccaggacacaggacggacaccctggcacccagaagaggcgttctcttgctcactgacccagatccagctcacacccctgccctggggccctctgccccaggagaaagggtctttcttctccccagccctccagcttcctgtagtgcctggggtccctctatgtccccggacacttggactgctcccctgggccgaccactctgttcccactttttcctcccacaactatccgtcctcctccaatcaaccactcactgggccacccctgtttcctttccatagtgaccaacgcaaccactgttcctggccccctcatatacatacacacaagcagacatgcacacacaaacacacacccccacttcctactgtacagagaccaagaacagaaatcgtttgtaaataatgaaccttattttttattattgccgaccccctaagatattgtattttacaaatctccctcccgtcacctctcccttattttgtattttatgaagttagtgcgggctttgctaccccttggcctgggacagagggacaccccaccctcaccaggcctccccgtgccgctgcccaagctgctgggcctttttaactgctcctccaccagctcagcacacgctttaagaaagcaaaattaaaaaaaaaaaaaaagattcagcatcaaaaaaaaaaaaaa

SEQ ID NO: 518 - DNA, 763 bp, Rat
ttttttttttttttttttggttctttttttcggagctggggaccgaacccagggccttgcacttcctaggcaagcgctctcccactgagctaaattcccaaccccagtacaagccactcttaccccagcctgctcaacaggctcccgactctgccctcctgttctgtaacctataactttaagctgtcaatcaggaaacgcagcttctctgcagccactccacttccctccagtccctcctgaggcctgcccttgcgcctttcgtctcaggcccttctgtcttcacactggctgtgctggctgctcactgcgcgcagcaacagagcaatgtgcggttgccctggccccgcagcttccttctgcttccagagcatttccacctttaacactgtgcaacccctgtgttctaacacgttaggctttcacgctctgtgtaagcgtggagaaacagtctgtgtgctaaggcatccctgttacagacatggtgcttgcatttctgctcctgactttgtttggtttgggttttctagtttggaggtgggttattttgatttttgggcgtttgtttccattttttttttttttttgagaaatgcaggtaatcgtgtttggctttgcatgtatcccagcctgagcgatactccttttcagcctcctgagtacaggattacagactggaggcaccatgacaaaacgcagtgagtacctgtgcgatgaatacactcatcctgcaggatcagagatttttccactctaactccgc

SEQ ID NO: 519 - DNA, 1496 bp, Rat
ggcacgagggaacgcggggacctccgtgcactattctggtgggccaggcatggcgggcgctggcccggtgttgagtattctggggctgctgcttgtgtctgctctgtttggcgtcctcggagagcgccccaaccccgatctgggggcacacccagaacgccgctcccaggtcggtcccggggccaccgaacctcggcggcagccgccacccaaggaccagcgcgagcgggcccgggccggatcgctgtctttgggcgcgctgtacaccgcagccatcgtggcttttgtgctgttcaagtgtttgcagcagggcccagatgaggctgctgtcccccgagaggaaaaaaacaagaagaaatcctcacagtcagaacaacagctggtgcagctgacccaacagctggcccagacagaagagcacctgaacaacctgatgacccagctggatcccctctttgagcgggtgactactttggttggaacccagcgggaacttctaaacgcaaaattaaagaccatccaccaccttctacaagactgcaagcctggcataggggtggaagctccagaaccagaagcccccatacactttccggaggacctggggaaagaagaccaagaggatgctggaaacagtcaggcctgggaagaacccataaactggagctcagagacatggaacctagctccttcctgggaagtggagcaggggctgaggagaaggtggcacaagacaaagggtccagcagtaaatgggggacaagcactgaaggtttagtaaaaacagtcgtcttgggattggggatttagctcagtggtagagcacttccctagaaactgcaaggccctgggttgggtccccagctccgaaaaaaagaaaaaggaggaaaaacaaaacaacaacaacaaaaaaaaccagttgtctcatactaggtcttcctctgtgcttttcccactcccagctgtacacacacacacacacacacacacacacacacacacacacacacacacacacggtgcataagccaagcgggcttcccttattaggaaaagagagactgcctttcagaatgtgaatggagaagacagacagtgggagctacagttcccttgtgttcccgaggctaccgatgtgccagccaccgaggctcaaactcggttttctcatggtttagacagaaaggcctttgcaaaaacaaaacagcagcactttattaaaatccagtgaggaaataaattatagaacttttacatcataggaggtagttcaagaggatctggagtttaaggccaccctgggctacatgaaactttgtctcaagaaaaacaaaactatgtacagtagccaggtacggcagcacacacctatacacccaacacctgagaggctgaggcaggaggcattcaagttcactgtcagcctgggtcacatagtaagatcctttctcaaaataaacaaaccatggcacaaaaaaaaaaaaaaaaaaaaaaaa

SEQ ID NO: 520 - DNA, 1243 bp, Rat
ccggcttgggtcggccgtggcggcctggctgtttttaggccaggtctctaggaccggcccgggaagatggtgctgggcggttgccctgtgagttacctattgctatgcggccaggcggccttgcttttggggaacctgctgctgctgcactgtgtctctcggagccactcgtttaatgctacggccgaactggatctcaccccctcaggcgccgctcacctcgagggtcccgcggcctcgagctgggaatacagtgaccccaactctccagtcatcctttgctcttacctacccgacgagtttgtagattgcgatgccccagtggatcacgttggaaatgcaactgcataccaggaacttggttatggttgtctcaagtttgggggtcaggcctacagtgatgtggaacacactgcagtccagtgcagagccctggagggaatcgagtgtgccagccccaggaccttcctacgaaaaaataagccttgtataaagtacactggccactacttcataaccacgcttctctactccttcttcctgggatgcttcggagtcgaccgcttctgtctgggacacactggaacagcggttgggaagctgctaacccttggaggactggggatctggtggttcgtcgatcttattttgctcatcactggggggctgatgcctagtgacggcagcaactggtgtactgtctactaaacgtggctgctgccctctgccggcaactggtgtactgtctactaagcacggctgctgtcctctgccggccagggaagcgagcatttggctggcgggataattaggagaagctctgaattctctgaacatcaccgtcctctttaggaggaaggaccgaccgagtttttcaacccaaatcttaaccttgcagaccagaatgacaagcactattgtgggagcccagtcataccttgcctcacatacaaaagctcaaagctcaaagacagtgacttttatccagagatcattttcagtgatgtttctgtgtggctggatttcagtcgtttggagcagggggacccagtaggataaaccgagggaatgtttaaccactcacagccttttgtgaccctcagttttcatgcacagatgagaagctgcgccagggagaagtcttgagaatatagaaatgactggattttaatacacaccaaaagtctgactctgggaatttaaattacaaaataaagttttaaaacctaaaaaaaaaaaaaaa

SEQ ID NO: 521 - DNA, 761 bp, Rat
cggcacgagccgcggcgtgcctctagctctccctgtgctaactgcccgcgccttgacagccgggctgcgcaaagcagagggattagttgggacctgccttggtgaccccatggcatccccacgaaccataactattgtggccctctctgtggccctgggactcttctttgttttcatggggactatcaagttgacccccaggctcagcaaggatgcctacagtgagatgaaacgtgcttacaagagctatgttcgagcccttcctctgctgaagaaaatgggcattaattccattctccttcggaaaagcattggtgcgcttgaagtagcctgtggcattgtcatgaccctggtacccggtcgtcccaaagatgtggccaacttcttcctgctcttgctggtgttggctgtgcttttcttccaccagctggttggcgatcctctcaaacgttatgcccatgctctggtgtttggaatcctgctcacctgccgcctgctgattgcccgcaagcctgaagaccggtcttttgagaagaaggctttgcctgagagtgcagaagagcaaccgtccttatatgagaaggccccacagggcaaagtgaaggtgtcataaaaattggaagagcaaagaatggaccttttaggcagttgcttctttgacacccaagatgacattagtgtgtatgtgtgtgtgtgttttcctttgatttatttatcttgggagtaaagagaaaaatacaatctgtaaaaaaaaaaaaaaa

SEQ ID NO: 522 - DNA, 1372 bp, Rat
gactcgcgcgcctgcaggtcgacactagtggatccaaagttttatccggggtatgctgaaactaattcttctcctcctgttttctggggctacgctgtcatccacgtggttcaccctgacctgtctgaacagcgtcacccacttgcctttgacaacagtgacactgtatgcctcctgcatcctcctgggagtcttcttgaacagcagcgttcctatattctttgagctttttgtggaaactgtctaccccgtgccagaagggattacctgtggagttgtcactttcttaagtaatatgttcatgggagtgcttttattttttgtcacattttatcatacagagttgtcttggttcaactggtgccttcccgggtcgtgtctgctcagtcttcttctcattctgtgcttcagggaatcctatgacaggctgtaccttgacgtggtcgtctcggtctgaggccacagactggtgggactttaaagggacctcagtactgcacctttgcttggactcgcacatgcgctgggagaaaaggcgaagaaaggattctctcagaggttctgttaagtgacagagtctcacgttaatttaatgactactaggtaataataatgcaggactcggtgtcacgaactcgaggactcgtggacagcacacgcgtgctagtggctctggggtggaggtgcgacggctcacacaggatgcgctgccccgtaagtcatgcccgtgtgcattgcacctgtgctaactgatgagctgaactgccgcaggaagcatgggcgtcagccctctgaagaggactcctcccaggcacacaacaggaatggagtcaccactaacttctgaagacatcagacccctgtcagattttaattacaaaatagccggggtgtatcccggtgatagaagttagcccgtgtacactacatgtttttctaataaacccgtttcttatacgactcctcatttttaatgtggttggaagcctctggctgtcctttgcacaggccctggctccttcccatccacccgtttctgtgagtatagtcagtcacgccagcaaggtgagtaaatgcccgatagggtgccattaactgttgtgtggaaagcataactctgttagggtttagcactttgttaaaaatgaaagccacatggagcatgtgtgtctccagtacatgtgctggcacaagtgtgaagtccagcgcccactgtaacttaccaggttagattgtagtcaaacgaccccccatttgaaaagaacaatgtataactctgaaggtttgaagatctgtgtgtgatttctgaactatacccgtgtatttaatttagattgtaatatactcgattctaaatgaagtcattgtattt

SEQ ID NO: 523 - DNA, 1265 bp, Rat
ggatgatcggagacatactgctgttcgggacgctactgatgaacgccggggctgtgctcaactttaaactgaaaaagaaggacacgcaaggctttggggaggaatcgagggaacctagcacaggcgacaacatccgagagtttttactgagcctgaggtatttccggatcttcattgcgctgtggaatgtgttcatgatgctctgcatgatcgtactgttcggctcttgagccctgcatggaacccagagcttacctgctggacatcgaggctccatttctgatgacttcaagaatgctcactggaaaaccagggaccttcccagaaggttccagctcatttgggtggagaacgtccatctcccaggcacttgacccttttcagccacagttccacctgtcttttgcagtttcaggaagatctgtaagccacagtgacagagtcaggctttgttaggagaaagacctagatctttcccttgttctgccattctatcttctcctggcccagcctctccagaaacctgacctaggctatttcttggttgacttgttagtgatcgttttgctttgatttgggtttgagggttttggtttttttttttttttttattgatacggtttctctgcagccctggctgtcctggagctcgggcaccagactggcctcaaacttacagagctccacctgtctctgcctcccaagtgctgggattaaaggtgtgtgccaccactccttagttgatgtgaatcaggcaccggcttgcagggccagccatgaaagtctagcagcctcttttgcactacaaggtccatgctgatggacccaacagtctggggctagtgaggtcttacgtccaaacacttccttcttactccgtgacagggtttacctggatcagcgaaagtctgctccagcactcgaaggagcaggtccaccgcccttgggacaccagcctctttagacgctaagcgttagccataacatgcttcttcagaagaggcctgtagaagaggtgctgtggtgatgttagcagacacctctctgtgctttcaagccgcttgtcaataaagtgtctttgggggctggagagatggctcagcggtcaagagcactgactgctcttccagaggtcctgagttcaaatcccagcaccacatggtggctcacaaccatctgtaatgggctctgataccctcttctggtgtgtctgaagacagctacagtgtacttatatataataaatctttaaaaaaaaaaaaaaa

SEQ ID NO: 524 - DNA, 980 bp, Rat
cggaagtgagccatggttgcggctgtggcgacggcgtggctgctcctgtgggccgcggcctgcacgcaatccgagcaagacttctacgacttcaaggcggtgaatatccggggcaagctggtgtcgctggagaagtaccgcggctcggtttccctggtggtgaatgtagctagcgaatgtggcttcacagaccagaactaccgagccttgcagcagctgcagcgggacctgggcccctaccattttaacgtgcttgctttcccttgcaaccagtttggccaacaggaaccagacagcaacagggagattgagaactttgcccgccgcacctacagtgtctctttccccatgtttagcaagatcgcagtcactggcactggtgcccaccctgccttcaaatacctaacccaaacttctgggaaggagcccacctggaacttctggaagtacctagtggccccagacggaaaggtggtgggggcatgggatcccactgtgccggtggaggagatcaagccccgtattacagagcaggtgatgaagctcatccttcagaaacgagaagacttgtgactgggtccccctgaaacccccattcctcagcaaactcaagtggtgcttcaagggcagagagccaatgcttctcttcccttcgctccctcagaggacgagcctaagacttggatgatttgaatccaagggcaacgaacaggcactgctggccaatgagagttcttaacagcacatcacccgccagcaggcctctagccaaaggaaatatggcatggctctgaggcagtcatctacctagccagccaagtcttacctcacagggaggctgtgaggattagcgtctaatacccatgaacatgcctgggggcagtgctagccaaggggaagcactccgcacagttttccacatgtaaacaaacattatctgtgataataaaacttgagttcgacataaaaaaaaaaaaaaa

SEQ ID NO: 525 - DNA, 2929 bp, Rat
tggcggcggtgctgaaggtaatttgagcaagaaggtggtgtcctcaaatagtcacttgcaagcatgccctctcttctttccctagtattgacctttttagctgtgtcttctccttcttgttgtcagaacagtgacacagcatctccaaaagctagtaatggggcctcattcctttggaataatatgcgacttcctgagtatatcaccccaattcattatgatctcatgatccatgcaaaccttagcactctgactttctgggggaaaacagaagtagaaatcacagttagccagcccaccagcaccattatcatgcatagtcaccagctgcaaatatctaaggccaccctcaggagaggagctgaagagatgctgcctgaagaaccactgaagctcatggaatattctgctcatgagcaagttgcactgctgactgcccagccgctccttgctgggtccgtgtacacagttatcatcacctatgctgccaacctgtctgagaatttccatggattctataaaagcacctacagaacacaggagggggaaaggagaatacttgcagcaacacagtttgaacccacagctgctagaatggcttttccctgctttgatgagcctgccctcaaggcaagtttttccatcaagataaagagggatccaaggcacctggccatctccaacatgcccttggtgaaatctgtgactgttgctgaaggactcatagaagaccattttgacatcactgtgaaaatgagcacctaccttgtggccttcattatttctgattttaagtctgtgagcaagatgactaagagtggagtcaaggtctctgtgtatgctgtgccagacaagataaatcaagcagattatgctctggatgctgcagtgactcttctagagttttatgaggattatttcagcattccatatcctttacccaagcaagatcttgctgcaattccagactttcagtctggtgctatggaaaactggggcctgaccacatacagagaatctgctttgttatatgataaagaaaagtcttctgcatccagtaagcttggcatcacaatgactgtatcccatgaactggctcaccagtggttcgggaacttggtcacaatggaatggtggaatgacctttggctcaatgaaggatttgccaaatttatggagtttgtgtctgtcactgtgacccatcctgaattaaaagttgaagaatatttttttggcaagtgtgttaatgcaatggaagttgatgcattaaactcctctcaccctgtatccacacctgtggagaatcctgcacagattcgggagatgtttgatgaggtttcttatgaaaagggtgcttgtattctgaatatgctaagagattatctgagtgcagatacatttaaaagaggaattgtacagtatcttcaaaagtatagttataaaaacacgaaaaatgaggacctgtggaatagcatgatgcatatttgtcccacagatggcacacaaacaatggatggcttttgctctaggaaccaacactcatcatcaacctcacactggcgtcaggaggttatagatataaagagcatgatgaacacatggacactgcagaagggctttcctctgataaccatcactgtaagagggcggaatgtgcacttgaagcaagaacactacatgaaaggttctgaatgcttcccagagactgggtctctgtggcatgttccgctgacattcattaccagcaaatcagattcagtccagagatttttgctgaagacaaagacagatgtgatcatcctcccagaagcagtggaatggatcaaatttaatgtaggaatgaatggctattacattgtgcattacggggatgatggatgggcttctctgaatggcctcttaaaagaagcacatacaacaatcagcagtaatgatcgggcaagtctcatcaacaatgcatttcagctggtcagcatcggaaagttatcaattgaaaaagccctggatttaatcctgtacttgaaaaatgaaactgaaattatgcccatattccaaggtttgaatgaactgatacctatgtataagttaatggagaaaagagatatggttgaggtggaaactcaattcaaggactttctcctcaggctgctaaaggaccttattaataagcagacctggacagatgaaggctctgtctcagagaggatgctcaggagccagctcttactcctagcatgtgtgcacaggtatcagctctgcgtgcagagggcagagcgctatttcagagagtggaaggcatccaatggaaacatgagcctccctattgatgtgaccttggcggtgtttgctgttggggcccagaacacagaaggctgggattttctttatagtaaatatcagtcttctttgtctagtaccgagaaaagccaaattgaattttccctctgcataagccaagacccagaaaaacttcagtggcttctagaccaaagttttaagggagagataataaaaactcaggaattcccacatattctcacgctcattggcagaaacccagtgggttatccattggcctggaagtttctgaaggaaaattggaacaagattgtacagaaatttgaacttggctcatcatccatagctcacatggtaatgggaacaacaaaccagttttccaccagagcacgtcttgaagaggtaaaaggattcttcagctccttgaaaaaaaatggttctcagctccgttgtgttcaacaaaccattgaaaccattgaagaaaacatacgatggatggataaaaattttgataaaataagactgtggcttcaaaaagaaaggcaggagttgctgtgacaatttgtttcataccaagttcctgaatttataattagtaaaattttcttcaatttggaaaaaaaaaaaaaaa

SEQ ID NO: 526 - DNA, 672 bp, Rat
gtcggacggtcgggtaactttgggcaggacaaggcaagagaagcggctgtttcagtagtgtttgtacccagaactcagcgaagtctacccttgggtagagcgaacgtccggccatggcttaccactcgggatatggagtccacgccatggccttcatcacatacgtgctgctggctgggatggcactaggcattcagcaaaggttctccccagaggtgttgggcttgtgtgcgagcacagcactggtgtgggtgttaatggaggtgttggctctgcttctgggcctctacctggccaccgtacgcagtgaactgggcaccttccacctcttggcctacagtggctacaagtatgtagggatgatcctcagtgtgctcacagggctgcttttcggcagtgatggctactacgtggccctggcctggacatcgtctgcactcatgtacttcactgtacgatctttgcggactgcagcttcgggtcctgacagcatggggggcccaacccctcggcagcatctccagctgtacctgaccctgggagccgctgccttccaaccccttatcatatactggctgaccttccacctggtccggtgacccctggtcctttggtggcactgagttttccatacattgaagatttggtttccttaaaaaaaaaaaaaaaaaa

SEQ ID NO: 527 - DNA, 690 bp, Rat
ccggcccgtcactcactcagacatggcgcgcgcggcgggaatcacagcggcgataaccttggcgctactcggggtcctggcgctcggcgcaggtgatggtgacttcagactggacgatgccctggaggacactgacaagaagccaacgcccaagcccccgacacccaagaagccatcctcaggagactttgacctggaggaggcactgactggcggtgctgatgaggatccccggaggccaggaagccggcccaagcctgatccgaagccacctgggccacccagagactcaggaggaatctctgaccgagacctggaggatgtggctggacatgggggacgaggaggcggagcgggggaccgcggtactgatggggcggagtcggaaggccagccccagggcctaatcccaggtgtggtcgctgcagtcctggcggcgctcgcgggggctgtgtccagctttgtagcctatcagaagcggcgcctgtgctttcgggaaggcggctccgcccccgtctaggctgactgacctgcgacccagatgacatcgcctggaccccggccccgccccccaggtcccagaatccacgcgggtcgcctgtagagggcagggtcgggccggagggtggggcggggccggggatcagaataaaccagttctgcccttgaaaaaaaaaaaaaaaaaaaaaa

SEQ ID NO: 528 - DNA, 2597 bp, Rat
gttcatagctgagaaatgcttttatagtttggcttcctttctgtttatctgcatttcttcctcagtttcttctctagagtttatctgctgaagaaatgaacatgtctttagaggtttttgcattttttatcctttacattctcttctttcctgttctttcctgcacactgtttgctcatcccgtggaatgtggtacacatccctttacatcacaagagtggtcacaaacaccatgcttcttctgggagaagttaagaggcagcatcttgactcgtgtctcgtaggtagcgagcgaggtgctgggactgcaggccgggctctggggccttgttgttaagctgcccctcccataatgatcccaggccctttgagccactgagagccaccgccgttgcagaacaggttataaagctaggttagtcttttatctgcacttgctagctgggagttttctctcattaaacgtatcaaccatttggtaaccttgagctacatgtctttcagtataattaatgattgtttttccttccttctattttaattaatgttcacagtgatgagctgattttctcctatcttccaaatgagaccagagaggtagctgttgtattgcttaggtaaatatcactgtgaacacatagattttaatgtaatttccatttataccccctgtgattgtttattcctttttgtacttttttttttctagacagggtcttgcttgtagcccaggctagtctccagttgacagtcttccggcttcagccttcagatggttgtttattttgaaactcattctatgtttttccatcgggagagtctttatattgctctttgaatccacttggcaagactaggaagtcattgatagactcgctactctctggttttcaaggtattgcagctgcacgttgcatgtttgtgcctcagctcttagtagggtaaatggtgtttagataccagagcctggatagtgagcgttcttgctgcctccagaccttattgattctttcttccaatgggaagaactaggaaggcatatacgtatacacatacccaccgagatatgggtataaacatatatgcaaatatgcagatggagataataatttatgtgcacatatttgtatatgtgcatctttatacataattttatctgaggttatcaaaaatttttttttgtccttttaggaaaagcagtggcattctgtaattctattcattcctctttgcacttatttccctttggagttttctcattacatcttacaactgtgactttgtggtgttaaagtatccaaattaagcatttgaatagatggctgcttctagtcttctgcacttgagttgtagtggggtgtggtttctttttacttgcaaatcaaacaaaaacccttgagtgtacaagactccagtggaaagcctggtgaatatttgttagtattcaatgccttatctttatcataggttctaagaagtagaatcactgggccaaaggataaataccatggggttttgctcagtgcagtcagcagtcccctgttgccctcagaaatgctgcaagatccccaatggatgcctggaagtggcagattatgcccaagtctatttttttctagacctctgttaaaacttaccttataaattagacatagtaagaagttaaaattgaacaactgtgacactatgcagtaataaacgttattaaaaacatgacttacatacttccagatgtttccatttagtattttcagatcctcaccattagatatactgtgaaaccttagtatttttgttatctgaatcgtgagagatgatgacttcactacctgactccaccttgagtcagggtctgttgtgtcccagggtctttgtggccaagaataaccttgaacttctgatcttggagctttcggttcccaagtgctggggtaacagctcttgcaccatcgtgcccagttttatgtggtgctggccatcaaaccatggctgcatggatttagaggagcagcccagccttctttgtatctcttctacaatgagctgccttgccttctttcatggttctggctcaggtgcccttccccccacggatcatctcccgtatttcctttattgttattttggagatgtgaatcctaatgtttgtgaagttcttcttggttcatcgtttatcatgctcactgattgcactattcattgtataaatgaataatttcatctttttattgcttcgtggttttcgagtcatgctttggaaaaaatcatccttattttccaggctttagagtaagactgtataatataatataattaatatagtataaaccatgcatgtaatttgttattagctacagtaaatatgtagatgagattaattacaataatgtatttcttttaacccccaaatgttattttaataagtaatctatatttaaaattattgatacttaaatttttattagtgtatattattcaaaaatagttaagtttcattgtattccatacatctgtagaatgcattttgatcatattggcccatgctaaacattgtgagaccacgtgtgtatgttttaattaaaaaaaaaaaaaaaaaa

SEQ ID NO: 529 - DNA, 1081 bp, Rat
ctgcagggccctcggggactggcttccgcgggcgtcatgacggctgcggtgttctttggttgcgccttcatcgccttcgggcccgcgctctccctttacgtcttcaccatcgccactgatcctttgcgagtcatcttcctcatcgccggtgccttcttctggttggtgtctctgctgctttcgtctgttttctggttcctagtgagagtcatcactgacaacagagatggaccagtacagaattacctgctcatctttggagtgttgctctctgtctgtatccaagagctgttcacgcttgcatattataggctgttaaaaaaagccaatgagggtttgaaaagcataaaccctgaggagacagcaccctcgatgcgactgttggcctatgctttcatgacgctggttatcataatgctgcacgtgttctggggcatcgtgttttttgacggctgtgagaagaataagtggtacatcctcctcacagttctcctgacccacctgctggtgtccacccagactttactaagtcctcactatgaagtgaatctggtgacagcatatataatcatggtgctcatgggcatctgggcattctgtgttgctggaggcagccgccgaagcctgaaactctgtctgctctgccaagacaaggactttcttctttacaaccagcgctccagataacctctgacggtcagcaccttcaaacagcagcctgtgtgccagaggaagggcagccgggccctgttctaaaatgacccttttcttctggagctttggagcagcagagcttctagcctgcaactgtcctgtgctttcatgcagcagcctctggaagagctgcagtgtggcctgcagcctggctgcacatttgaggcatctggggaaacaaagaccgatgcttctgggcctcccctctagactcgagtatcccagatgtgcaatacagctgagtcactggggtccaatgggaagtttcagagaacccaaaggcagttctgtatttgtctcctaagccaacctctgctgagcaagtaaatttctgaaaacctgggaaaaaaaaaaaaaaaaaaaaaaa

SEQ ID NO: 530 - DNA, 906 bp, Rat
aaatcacatcgcagtggcttctgcgacagcagatagaaacatttccagagtgacacacaaatacttctaagcctcagccggagcccacggcaatggttatgggttggtgcgatgaaaccatttgcagttacgattcaattgtgaatgtgcttttccctctgcagtgtagaagtcttttttttaaaacagaattccaatctcctgccagcacacatctttattcgggcttcacctatttgcataatagggaacgaatatgaatatatattcatgtatgtgtgtaatcatagaagtcatctttatcttggtttcgccgcagcagattactttttccctcatcatggcaccgggaattgtttccaatagtggaagtttcatagttacccacaaatgtgacttttccatgttgacagatcccacagagggtttggagacagtgcttgtggccaacggggctgcacttgtgaagtgagggcgttctgaagttcaagttctgagcggacctccactctgcaccctaggagcagatggtgtgttgttctgcgttgggtttcgaaagcccagatcctctggcattggcctgggacgcaatggaagtgtaaatgctctcattacccactaccgccctgaaagctctcagcaccctgtggtctgtggatcttgagactcaggcttctcagggaggctgagcatttaaagaagagtttaaaaacatttagggctgctgaccaagccccttagcaatcacctgagctaggtttttctcttcattctaactcctagactcttgattgtacgtcttaggtttaatttccattctttgccttgtgttactttacccttcagtttgtggactttcattttgaaaataaaatcttctcctcattaaaaaaaaaaaaaaaaaaa

SEQ ID NO: 531 - DNA, 2271 bp, Rat
tagctaggatgcccgagtctcgagagtctctcttccatatcacctgaccagcggggccctggcttccccccactgtcttccttcctctgttttctgtgtgcagcggagtgtgtgggaagacttggttatccccctcaagctccattctgttccatccttctcccaggagatacttggagatgcctgtgctgtggctgctgttgctgctgccgctcctgcccctgctggccatgctctgccagcagagatctccgggtgccagaccatgctggctgatcagtctccagcaccgggtggcttgcgtggtgctgagctgggcagccgcctggcagcggcggaaactggaacagagcacactgaacgtgagccagagccagcagcaggccctcatggggtgtctgaaggaagcccagggttcctgctgtctccccagggagaacacagacatgaccaccttccggaatcttccactgacaaaaaccagccacacccagcagaaagaaagtgaagagaagctcctgccccctaccttaccccagtaccatggagatgcctctttgcaggtcaccctgctgggtctaatgaccttaaacaaggcctatccagaagtgctggctccaggaagtactgcctgtgtgacccctacatccccatggccctattctgtcccctggctcgggcatgccctgggccgggtaagtcccattggagccaaggatgcccggaccctgctgctggaggcgttgatatccccggggctgagggtacttgaggcaaggactgcagtggagctcctggatgtctttgtgggcttggaggctgatggtgaagaactggctgaggtcatagcatctgggagcctagggaagctccccagacgagcagctgagctgcaggaggccctagagcagggaccccgaggattggccctccggctctggccaaagctgcaggtggtggtgactctggacgcaggaggacaggcagaagctgtggctgcccttagggtcctgtggtgccaagggctagccttcttctctcctgcttatgctgcctctggaggggtgatggccataaacctgtggccagagcaaccccaaggatcctatcttctgtcccctggagtcccctttattgagctgcttccaatcaaggaaggaacccaagaggaggcagcctccactctccttcttactgatgtccgaagggaggaaaagtatgagttggtcctgactgacagcaccagcctgaccaggtgccgcctgggtgacgtggtacaggtgattggcacctacaatcagtgtcctgtggtcaggttcacctgcaggctgggacagaccctgagtgttcgaggagaagttactgatgagaatgtattctctgtggctttggcccaagcagtggggcagtgccaggggccaagctgttggaccatgtctgtgtggagagccacattctggactcctatgagggatccgccccacactacgaagtgtttgtggagctgaggggcttgaggaatctgtcggaggaaaatcgagacaagcttgaccactgccttcaggaagcctcccctcggtacaagtccttgcggttctggggcagcgtgggtcctgccaaagtccatctggtgaggccaggaagcttcagagtacttcgggaagcactagcagcctgcccctcctcttcctgtcctgaaatgcctcgggtcctcaggctcaggcacctggcccagctcctgcagaagagggtgataccctaaccaaggcagcttccctcctgctgcctcactctttcctctgggatatctctggatgttgagtcctgggccagacgtcacataatattggcccatcagagcctttgggccttagggaggccctagactcattggccagttttaagatggatacagctgaacccatcgacggtctcccatcagcctctcctgcctgaggctgctggtggcttctctgtgttgcagcccttctcatgtgcttggccaaggtacagcaagggctgaaagtataggcagtgctccgggagcagatgaagaaaccacagcctcgttgtctcgtggtctaggctgtgtcttgcaaaacctcccgaaaggctgaggctatggcccacagtcgtccagtgtttaatactcttcctaccagctctcctcccatccctccatcctctctcccttgcccactctatcactctgttccctggatcaagtcccaaataaatttttttaaaaattaaaaaaaaaaaaaaaaaaaa

SEQ ID NO: 532 - DNA, 642 bp, Rat
ggagctcgcgcgcctgcaggtcgacactagtggatccaaagaattcggcacgaggtgagactgaagggcaacttgtttttgtggttggttggttagttggttggtcttttcctcttttcttccttttctaggcagtgttttccttttcaaggtagtccctcaagtccagctaccactgccttagtctccttaagtactggcctgatagcctgcatccttctgaaatacagcttctcatgaaactatgacagtctgcacactcctagtggcaaagagcactttgcttttatctttaagctgtttacttctctgttcattgtttctgtacagtgtctcggggagctattctaggtgtcctgttagatggctggtgtgtttatctagtcagttaccttgggctacgtcccaaagtttactaaaaaggaaattgagtatgaactaactgaaatcaaatgatgactcatgggctgtattgctgtctactgaacaattgtggatgcactctggggggctccagtgtggcttggttcattttgcattgaaacaattgatatatcattattttaataaagaataaacatttccaagatgtggaaatgttggcactaaaaaaaaaaaaaaaaaaaaaaaaaaaaaaaaaaa

SEQ ID NO: 533 - DNA, 910 bp, Rat
gcctaggcccggccgcgctcggacgcttcgatccccgagcgggtcgcgggtagtccagcggccgcggaacgatggcgtggcggcactgacaggcgcgggcggctgccgagccccgcgggccggcatggcgggccagttccgcagctacgtgtgggaccctttgctgattctgtcgcagatcgtgctcatgcagacagtctactatggctctctgggcctgtggctggcgctagtggacgcgctggtgcgcagcaacccgtccctggaccagatgttcgacgccgagatcctgggcttctccacccctccaggccggctctcaatgatgtccttcgtcctcaacgccctcacctgtgccctgggcttgctgtacttcatccggcgcgggaagcagtgcctggatttcactgtcactgtgcatttctttcacctcctgggctgctggctctacagctcccgtttcccctcggcgctgacctggtggctggtccaagctgtgtgcattgcactcatggccgtcatcggggagtacctgtgcatgcggacggagctcaaggagatccccctcagctcagcccctaagtccaatgtctagacttgggcccatcggacactctgctggcacttgtgccccatcacctcgggctgctcagacctccagatggggtccggcccaagtctgagaggaaccctggaaatgtgaagcctgttggtggagagatagtgaggtcctgccatgaaggcaggtagcagccatggtcacagatgcaagaacggcctctgcctgctggagccttggtatttggaggccggtgaggggcctcacggagggtagtgacagatttggaaccatgtcgtgtgagccaccatactgtcaccagcctgttattttaaaaaaaaaaaaaaaaaa

SEQ ID NO: 534 - DNA, 2928 bp, Rat
tggcggcggtgctgaaggtaatttgagcaagaaggtggtgtcctcaaatagtcacttgcaagcatgccctctcttctttccctagtattgacctttttagctgtgtcttctccttcttgttgtcagaacagtgacacagcatctccaaaagctagtaatggggcctcattcctttggaataatatgcgacttcctgagtatatcaccccaattcattatgatctcatgatccatgcaaaccttagcactctgactttctgggggaaaacagaagtagaaatcacagttagccagcccaccagcaccattatcatgcatagtcaccagctgcaaatatctaaggccaccctcaggagaggagctgaagagatgctgcctgaagaaccactgaagctcatggaatattctgctcatgagcaagttgcactgctgactgcccagccgctccttgctgggtccgtgtacacagttatcatcacctatgctgccaacctgtctgagaatttccatggattctataaaagcacctacagaacacaggagggggaaaggagaatacttgcagcaacacagtttgaacccacagctgctagaatggcttttccctgctttgatgagcctgccctcaaggcaagtttttccatcaagataaagagggatccaaggcacctggccatctccaacatgcccttggtgaaatctgtgactgttgctgaaggactcatagaagaccattttgacatcactgtgaaaatgagcacctaccttgtggccttcattatttctgattttaagtctgtgagcaagatgactaagagtggagtcaaggtctctgtgtatgctgtgccagacaagataaatcaagcagattatgctctggatgctgcagtgactcttctagagttttatgaggattatttcagcattccatatcctttacccaagcaagatcttgctgcaattccagactttcagtctggtgctatggaaaactggggcctgaccacatacagagaatctgctttgttatatgataaagaaaagtcttctgcatccagtaagcttggcatcacaatgactgtatcccatgaactggctcaccagtggttcgggaacttggtcacaatggaatggtggaatgacctttggctcaatgaaggatttgccaaatttatggagtttgtgtctgtcactgtgacccatcctgaattaaaagttgaagaatatttttttggcaagtgttttaatgcaatggaagttgatgcattaaactcctctcaccctgtatccacacctgtggagaatcctgcacagattcgggagatgtttgatgaggtttcttatgaaaagggtgcttgtattctgaatatgctaagagattatctgagtgcagatacatttaaaagaggaattgtacagtatcgtcaaaagtatagttataaaaacacgaaaaatgaggacctgtggaatagcatgatgcatatttgtcccacagatggcacacaaacaatggatggcttttgctctaggaaccaacactcatcatcaacctcacactggcgtcaggaggttatagatataaagagcatgatgaacacatggacactgcagaagggctttcctctgataaccatcactgtaagagggcggaatgtgcacttgaagcaagaacactacatgaaaggttctgaatgcttcccagagactgggtctctgtggcatgttccgctgacattcattaccagcaaatcagattcagtccagagatttttgctgaagacaaagacagatgtgatcatcctcccagaagcagtggaatggatcaaatttaatgtaggaatgaatggctattacattgtgcattacggggatgatggatgggcttctctgaatggcctcttaaaagaagcacatacaacaatcagcagtaatgatcgggcaagtctcatcaacaatgcatttcagctggtcagcatcggaaagttatcaattgaaaaagccctggatctaatcctgtacttgaaaaatgaaactgaaattatgcccatattccaaggtttgaatgaactgatacctatgtataagttaatggagaaaagagatatggttgaggtggaaactcaattcaaggactttctcctcaggctgctaaaggaccttattaataagcagacctggacagatgaaggctctgtctcagagaggatgctcaggagccagctcttactcctagcatgtgtgcacaggtatcagctctgcgtgcagagggcagagcgctatttcagagagtggaaggcatccaatggaaacatgagcctccctattgatgtgaccttggcggtgtttgctgttggggcccagaacacagaaggctgggattttctttatagtaaatatcagtcttctttgtctagtaccgagaaaagccaaattgaattttccctctgcataagccaagacccagaaaaacttcagtggcttctagaccaaagttttaagggagagataataaaaactcaggaattcccacatattctcacgctcattggcagaaacccagtgggttatccattggcctggaagtttttgaaggaaaattggaacaagattgtacaaaaatttgaacttggctcatcatccatagctcacatggtaatgggaacaacaaaccagttttccaccaaagcacgtcttgaaaaggtaaaaggattcttcagctccttgaaaaaaaatggttttcagctccgttgtgttcaacaaaccattgaaaccattgaaaaaaacatacgatggatggataaaaattttgataaaataagactgtggcttcaaaaaaaaaggcaggagttgctgtgacaatttgtttcataccaagttcctgaatttataattagtaaaattttcttcaatttgaaaaaaaaaaaaaaa

SEQ ID NO: 535 - DNA, 924 bp, Rat
cttgggcagaccggaacctgccctctccagggactcccgtcgcctgcctagctgagtggatcctagcacccctggaggggtggccgcagaagagttccttctggactcagagaagcaggatccaggctccatcagctcagttcccctccaccaagaaacagcccagcgagcagtacctggtggcgccatgcttcataacgtcagcaaaggtgtggtgtattcagctactgtagtccttggtctgcttgcctatgtggccttcaaatgctggcgctcacgtaagcaaagacaacagttggctaaagctcggactgtagagctgggggaccctgaccgggaccaaaggcatggtgacagcagtatcttcgtggattctcctcatggtctggagccctgtattcccagccagggaccacatgcagaccttggctgccgactttacctgcatattccacagcagcagcaggaggaagtccagcggctcttgatattgggggaacctgccaagggctggcaggggctggcaggccaactgggctaccaagctgaagctgtggaaaccatggcctgtgaccaggacccagcctatgccctgctaagggactgggctgctcaagaaggcagtggagcaaccctcagagtgctagaggatgctctgactgccataggccgagaagatgtggtccaggttttgagctcaccagctgagggctgctctgtggtgtgagtgacacatcccagggcacttctccagcttcacaaaagatccagccacttcattggggggatgggtaagagcatggggcatggctttccccacaggtcctcattctgcctctttatgtgctccagctattttttctatttcttttcagaatcacgtattaaaggcacctttggatttttaaaaaaaaaaaaaaaaaa

SEQ ID NO: 536 - DNA, 1744 bp, Rat
ctgactgcaatccgagccaatggcaaaaacccttctgaagcccggccccgcggaaggaatggtttttgagttgtttgtttctctttaataggggaactctgccttgcccacgcttttactttgtgcttgacggactcgagaggcagtttaggacccggaacaagaacgccgggctacagaaaggatgaagtaccttcttgacctgatcctgctgctgcctctgcttatcgtcttctgcattgagtctttcatcaagcgtttgattcccaagaagaaaaaatccgtcgctggagagatcgttctgatcaccggagctggtcatgggattggaagactgaccgcctacgaatttgccaaactaaacaccaaactggttctgtgggatatcaataagaatggcatcgaggaaacagcggcgaagtgcaggaagctaggtgcccaggtccatccctttgtggtggactgcagccagcgggaagagatttacagcgctgtgagaaaggtaaaggaagaagttggagatgttagcattctggtaaataatgccggcgttgtctacactgcagatctattcgctacgcaggaccctcagattgaaaagactttcgaagtcaatgtgcttgcacacttttggaccaccaaggcgtttctcccagccatgatgaagaataatcatggtcatgttgtcaccgtggcgtcggcagcagggcacaccgtcgttcccttcctgctggcttactgttctagcaagtttgctgctgttggcttccacagagccttgactgatgaactggctgccttgggatgcactggagtccgaacatcctgcctctgccctaacttcataaataccggcttcatcaagaacccgagcaccaatttagggcccaccctggaacctgaggaggtggtagagcatctcatgcacgggatcctcactaaccagaagatgatcttcgtcccgggctctatagcgcttttgacagtattggaaagggtgtttcctgagagattcctggacgttctaaagcacaggatcaacgttaagttcgatgctgttgttggctacaaagataaatgacgcagaccgcctggttttcctgaaagctgaatcactcgattcaagttgatctcaccaaatattaatccaaattctgatgtttttaatgttttctctttatcttgtctcttcactgcctccccttgaagctgtgaccatttccatgaaagccagtttcctgtcatggacccaaacagccctaaggaagttgctcctatgaagaaggggcagggacgattggcctcgtgatagcgatttccccagatactgtagctcaccaccgggttgtcagaacttgaactgtcactttttacttatggtatctgtaactgtactttagtttgttcgattcacactctccgctccgtcccgtataacgttagaaaccttaacctccccgggtagaatgaaggactgagtctagtgtcatttcacagcggtgtcatgtgctctgaaacattccgtcccatgtatcagcgctgtttcctgagacgccggcccaaggtagcttgaagtaaaagtgtctgtgagatttcgggctggggacagatggacaggtggacaggtggaaataataaatggaccaaaactcatgctcagtgtctctatctgctgcaaagagaccatggcttgacctctaaataaaaggaaaatcattaacttgaaaaaaaaaaaaaaaaaaaa

SEQ ID NO: 537 - DNA, 891 bp, Rat
gtcaggctgtgtcacgagtaacctcttagcctcagcatccggaagttccaaagagaatatttcacgttggatagaattttacatataccattgtttttggcaggttcagccctccagatcctaacatcatgaattcagttccaacacaactgatcttagtccttacttcgctgcttttgatcctgcctggcgttgaagcagtcgaagctggagatgcgattgcactcttattaggtgtggttctcagtgttacaggcatctgtgcttgcttggggatatatgcaagaaagcgaaatggacagatatgactttgaaggactcttctgaattagacttcaccctgaccattgtgctgaaaacccttgtgctgttgaggccgaacccaagatttgctctcacctgtcctcagaaagaggattacagttagctgagggttaacaccctcagttaagagaatgctttcctgttcatacttgtttctcctatgatgggagcagatggggtggggggagaggctcttaacaacaaagagtgcagtaataatgtggcccataatttgtatttgctgcttgggaggtggccaaagcgagagggcttaagtttgcaaaagtattatctcatactttgaaagtgtttgttcagaatctagtaaatctacatcgttattataatcactgcctcttgcattctgggggttctctctttcatttggggggttggattgggttttggatttgtttttttgttgttactgttttctttttaatgcttctgtttttaacatagttgtacttagatcttaatagccaaaaattgaaacttttaactctgaggaaaagtttaataaaaatgtattaaatgtatctattactaaaaaaaaaaaaaaaaaaa

SEQ ID NO: 538 - DNA, 1454 bp, Rat
ccccatcgtactgtccactgccccaccaaccatgaggccggctcctcagccccaggactgtccagcatccatctgcctgaatggtggtagctgccgtgtaggggcaaaacaccacctggagtgcctgtgccccgagggcttcattggcctgtactgtgagagtcccgtggaacaaaggacaaagcccagctccataccggacaccccacggcccccacggctgctgcctctgcgcattgagccggtgagccccacctccctgcgtgtggagctgcagcgctacctgcagggcaacaccgtgcagctgcggagcctccggctcacctaccgcaacctgtctggccctgacaagcggctggtgacgctgcggctgcctgcttcacttgcagagtacacagtcacccagctgcggcccaatgccacctattctatctgtgtcacagccctgggagctgggcggacacctgaaggtgaggaggcctgtggggaggccaacactccccaggccgtccgctccaaccatgccccagtcacccaggcccgggagggcaacctgccactcctcattgcacccgccctggctgctgtgcttctggctgtgttggctgcctcgggggcagtctactgtgtgcgacgggcgcgggcaagttccacagctcaggacaaagggcaggtgggaccagggaccgggcccctggaactagagggggtgaaagtccccttggagccaggctccaaggcatcagagggaggcggggaggccctatcaggtggtcctgaatgtgaggtgcccctcatgggctacccagggcccagtcttcagggggtcctccctgctcagccctacatttaagcacgtgagaaggagcagccaggaggctgggctttcagtctccaccctcctgctgctacagaaggaagttctcaatgcgcaccacagtgcacatgtgtgaccggtgctgtgggacagcagccagtccccgaccctctctgggctgggtcatctgaaagctgctacagcccaaatgaactcccagcaccagcatccagtacagagcctgctgccttgcgcagtctgcagtcctgggacgggaaccctgccatgtgctggtagcatggctaggatgttgggcttcccgggccctggggtctggtaaccagtgaaggaagcccccaaaaatagttggtagggaaggcactagggccgtggccgtggccccgaaagtgcaggaacacttgaaactggaaaggaaggtgctctgggcacacgtggatttgcttctattgttttgtttttctcctaatgtatttataaaagatcttttcccgtttatgctgggaaaaagtgtttttcaaactcagtgacaaggacttttggtttttgtaagactattgatgatatgaaggccttttgtaagaaaataaaaaattaaataaaaaaaaaaaaaaaaaaa

SEQ ID NO: 539 - DNA, 545 bp, Rat
attgggttctgtgtctgtcaccaccattgagccgtgtgttcaggttggaagtcctgctagacattctctgcaccctcccttgtgcatctctataggtgccactgtcccctactttgcagaaggctctgggggcccagtacctaccaccagcgccttgatccttcctccagagtacagttcatggggctacccctatgaggctccaccatcctatgagcagagctgtggtgctggtggtacagatgttggcctgatcccagggagctgaccctggtatgctaacccatgccaccttgtttggtggttctggcctttgccctggcatgggatgcccagggcctcgtgcctttgctctctacctggcccagctactcaggacctgcagctgtcgggggaagacccccctgtggaccagccactcttggctcctctggaatgaattattcagtcctcttcttgagaggttggggtagggcggcagagatctggggcctggagagactgtataaataaagcgctttatttgtagaaaaaaaaaaaaaaaa

SEQ ID NO: 540 - DNA, 1549 bp, Rat
gtgaagtggaccctgatctgaagtgcgccctgtgccacaaggtactggaggacccgctgaccaccccgtgcggccacgtattctgtgccggctgtgtgctgccttgggtagtgcaggagggcagctgcccctcgcgttgtcgcggtcgcctatcggccaaggagctcaaccacgtcctcccactcaagcgtctcatcctcaagttggacatcaagtgcgcgcacgcggcacggggctgcggccgggtggtcaagttgcaggacttgcccgagcacctggagcgctgtgacttcgcgcccgcgcgctgccgccacgcgggctgcggccagctgctgctgcgacgcgacgtggaggcccacatgcgcgacgcctgcgatgcgcggcccgtgggtcgctgccaggagggctgcgggctgccgctgactcacggagagcagcgggcgggcggccactgttgcgcgcgggctttgcgggcgcacaacggcgcgctgcaggcccgcctgggcgcgctgcacaaggcgctcaagaaggaggcgctgcgggctggcaagcgggagaagtcgctggtggcgcagctggccgccgcgcagctcgaactgcagatgaccgcactgcgctaccagaagaagttcaccgagtacagcgcgcgcctcgactcgctcagccgctgcgtggccgcgccgccaggcggcaagggtgaagagaccaaaagtgtgactcttgtcctgcatcgggactctggctccctgggattcaatatcattggtggccggccctgtgtggacaatcaagatggatcctccagtgaaggaatctttgtatccaaaatagttgacagcgggcctgcagccaagaagaggcctgcaaattcatgacaggattattgaggtcaacggcaaagacttatcccgggcaactcatgaccaggctgtgaagctttcaagacagccaaggagcccatcgtggtgcaggtgttgagagaacaccgcgagccaagatgttcacgcctgcctcagagtcgcagctggtagacacaggcacccaaaccgacatcacctttgagcacatcatggccctgacaaagatatcttctcccagcccgcccgtgctgggtccctacctgctgcctgaagagcacccctcatcccatgaatactatgatccgaatgactacatgggggacatccaccaggacatggacagggaagagctggagctggaggaagtgggcctctacaggatgaacagccaggacaagctgggcctcaccgtgtgctaccggacagatgacgaagacgacattggcatttatataagtgagattgaccctaacagcattgcggccaaggatggacggatccgtgaaggagaccgcatcatccagattaatggcatagaagttcagaaccgtgaagaggccgtggctcttctaaccagtgaagaaaataagaacttttcactgttgatcgcaaggcctgagctccagctggatgagggcgggatggatgatgacaggaatgactttctggatgatttgcacatggatatg

SEQ ID NO: 541 - DNA, 2920 bp, Rat
ctcctgtgagcagcgcgcggtggtagcggcggcggcgggactcggcgcggccggacacgggctcccctcccccgcagccgggcggggatctgccaggcctgcggtgccccccgcccaccgcttgcctcggcctctgcctcgctgctctccctcgtcggagcggccgctcgagcgcccggctcgaggcccgcgggaagcgcggcgcggtccgtcgtcccgcggaggggcggcctcccggcatcttcgcggcgaccaaggaccagcgggcaggggaaccaacgggatggcgcgtccgcggccccgcgagtacaaagcgggagacctggtcttcgccaaaatgaagggctacccgcactggcccgcccggattgatgaactcccagagggcgccgtgaagcctccagcaaacaagtaccctatcttctttttcggaacccatgaaactgcatttctaggtcctaaagaccttttcccatataaggaatacaaagacaagtttggaaagtcaaacaaacggaaaggatttaatgaaggattatgggaaattgaaaataatccaggagtgaaatttactgggtaccagacaattcagcaacagagctcttcagaaactgagggagaaggagggaacactgcagatgcaagcagtgaggaagaaggtgacagagtagaagatggaaaaggcaagagaaagaatgaaaaaggaggctcaaaacggaaaaagtcctacacttcaaagaagtcttctaaacagtcccggaaatctccaggagacgaagatgacaaagactgcaaagaagaggagaacaaaagcagctctgagggcggagatgctggcaatgacacaagaaacacgacttcagacttgcagaaagccggtgaagggacctaactaccgtaatgaatgctgcatattgagagaaaccacaagaaggttaactgtttgattgtctgattcttggatttgatatgaaccaacagtctttgttgtcactgacaaagccccagtgtgtgtgtgcattacattcctctctgttctgctgaagggaaaaaagagacattttaacctttttaaggttattgacttaattttatgttatttggttgcatgaagttgcccttaaccactaagaatgatcaagattttgcagacttctccgtgtctaggctccttttccaaggcagtccaagtcatcagctttctgcctctatcccaccatcatcaaacactcagcgaaatagtaattcgtatttttagataattactcaacataatacttcaggatgggattttctttatagcagaactcaagaaccaactcctagatacatactgttggtatatggagatgaaattacagtcatctttcagttttaaggccatgtgtaaagtttaaccacattgtacaatacctattctgtattagaaatagctagttgaaacttatacttctcaaaactcatgttcctgtgtacacaagctgagtttacatgtgaacttagtgagtctttttatgtcataccaaaataaagcaaggatttatttttttcccaaagccaatacgatttgagctaatcactcaagatggtcactttacacttgaaagctgaaatcagcaggagcactatgggaaaacaaagcattgactcttgaagatagacttttaaactaaacttttcttttagaactagaattagagtagttaccattcatccaccaagcattattatgtgtacattatcgtcgctgctgtgctaatagagtcttatttatttttatgccagcttatactgtgagaacacattagtcagtttgggtttccctagccctgctatgcttgtccttggaagatcttttgtgtatgtctgaggtttgtagctgaaaagtttactgtaaaaaaaaaatcaaaaacaacaaaaaaatgtattgtttttacagaataaatttattggaatgtgtcctgggagtaaggtttgaggttgtaaacacctgagtcagtgtcatttggctccatatgtgtaatgtgaagtattgatgtaattcttgtgttatagcgaaggtggacagcaaactgacattagaataagtgcaggtgagaatcttattttttctatcatttttctttttaaatactctggatgttaggttaatcgaaaacactgggagggacaggagggagaaaccgtagcatctgtctgcatgtctaagaaaacaccagctcagtggacactgtgtttacacacagccttacgtgcatcctgtttgctttgggtgttcttaccgtgttgaagaactaatgaacatgaagagaaaacagaagaagacttaaatcccagcgtggtcgtgatgatgaaggtgatgcagggctctgaggcttagatgcaccagtcagtctactgcccctgcgacatcaccgtccttcaggcttattcctgtcatttagctatcaatggctccccaccgtactctcacatttccaagtatggaaaattcgttaaagacaggctgtcaagtcagctattttctttaaaaggtactttttcattttaagtattttattttaaaatgaaatttgtcaaaagatatcttcattgtaatgcaaaacatatggagaacttagataacaatttaaattggaagatataacaaaggttttttgtttgtttgtttgagacagggtttctctgtgtagccctggtttcctggaactcactctgtagaccaggccggccttgaactcagatatcagcctgtctctgaatcctgagtgctgggattaaaggtgtgtgccaccattacctggcacagatttcttaaataaaaagttcaaaatttgtcatgaaaatgtatatataaaatgcttcaaaatgaataaagtttatcttcataagccccaaaaaaaaaaaaaaaaaaaaaaaa

SEQ ID NO: 542 - DNA, 379 bp, Rat
gagacgtcgagctgagcgaccgcggcagagaacgagatgccggtggctgtgggtccctacgggcagtcccagcccagctgcttcgaccgcgtgaagatgggctttgtcatgggttgcgccgtgggtatggcggccggggccctgttcggcaccttctcctgtctcaggatcggaatgcggggtcgggagctgatgggcggcattgggaaaaccatgatgcagagtggcggtacctttggcactttcatggccatcggaatgggcatacgatgctaattagggcacggatgccctgctacacccaaacttcctcatccatttcgaaccttgtacaataaagtttttttcttcttgttatcagtctaaaaaaaaaaaaaaa

SEQ ID NO: 543 - DNA, 2287 bp, Rat
gttggagcgggcggccagggcagagcattggctctcattcttcaacatccctagaagacacagttctctccagaacctgctccatcctggaatcccctcatctaaaaggccctgtgaagacagacaatgcctgttaacttggggcaggccctgggcctacttccttttctggccaaggctgaggatgccacattctctgggtcagatgttatccagcaaagagagcttgccaaccctgagactgctcgccagcttttcaggcagtttcgttaccaggtgatgtctgggccccaggagacgctgagacaactccggaagctctgtttccagtggctgcggccagaggttcacaccaaagagcagatcctagagattctcatgctggagcagtttctgaccatcctccctggggagattcagatgtgggtgaggaagcagtgcccgggcagcggagaagaggcagtgacccttgtggaaagcctgaagggagatccccagaaactgtggcagtggatcagcattcaggttctaggacaagagatcccatttgagaaggagaattcagcacgctgccgtggggacaaggtggagcctgcactggaggcggaacccactgtggaggtggtgcctcaggacctgccccttcagaatacatcctcggcacctggggagctactgagccatggtgtgaaagaggaatcagatatggagccagaattagctctggctgcttcccagcttcctgccagatctgaggaaaggcctactagagaccaagaggtgggaacagcacttctcccatcactacaggaggaacagtggagacacttggattctactcagaaggagcagtactgggatctcatgctggaaacctatgggaaaatggtctcaggagcaggcatttccaactccaaacctgacctgaccaacatggcagaatatggggaagagctggtggggctgcaccttcacagcgctgagaagatggcaagagccccctgcaaagaagacagacaagaaaatgacaaagagaacctaaacttggaaaatcacagggaccagggatgtctggatgttttcgatcaagcaccaggagaggctccaccacagactgccttgagtgatttcttcggtgagagtgagccacatcattttggaggagagagtgtcccagaggctctggaaaaccttcagggtgagggaactggggcgcatctctttcctcatgaaaggggctctgggaaacagctaggtcagcacatacagagctcttcttcaggagagctgtctgccttgtggctagaggagaagagagaggcctctcagaagggccaggccagagcccccatggcccagaaactgcccacctgcagagagtgtgggaaaaccttctataggaattcacagcttgtttttcaccaaaggactcataccggagagacatactttcattgccgcatttgcaaaaaagcctttctacgaagctcagactttgtgaaacatcagagaactcacacaggagagaagccctgtaaatgtgattactgtggtaaaggctttagtgacttctcaggcttgcgccaccatgagaaaatccacacgggagagaaaccctataaatgccccatctgtgagaaaagctttattcagaggtcaaacttcaatagacatcaaagggttcatacaggtgagaaaccttataaatgtacacactgtggcaagcggttcagctggagctccagccttgacaagcatcagagatcacacttggggaagaagccctgcccatagccacacccccagacactgcggtccattgcaaccctgctcagatcctcctagaggaacttcggccagaaagacctcctcttctttgtgttgcagggagaggagctggacactttgatgtggaggagatgttgttctcagttaagtgtgcttagtttttccttttgcaccaggaaaaggaaacagtttttgtttgtttcagctggcctcctatttcggaccccttgggaaaggcatgccatggaggtaatggctttagtagctctcttggatgagaacctgactggcgtagccacagttgcagctggcaatgggaaactcagatgagctttagaactgggcttctagagcaggctgtcacagaaggggaggcagttcggcctgcgagtgcacgccgtctttgtcagacaggtgcagagttcctgtttaactgtcccttatttgaaataaactgagctcacttggtctctatcttccttgtaaaaaaaaaaaaaaa

SEQ ID NO: 544 - DNA, 2351 bp, Rat
ctcgcttactacaaccccttctacttcctaagcgctgcggcgccagggccgggggcggccacgagcgccggcgccaccccgacagccgtcgcgggcctgacggcccgggccccgcacgtgcaggcatctgcccgggcggtccctgtgaccagggtgggctctgcagcccctgcacggacggcgagcgacaccgggcggcaggcaggtagagagtatgtcattccatccttggcccacagatttatggcagagatggtggatttctttattctcttctttataaaagcgaccattgtcctgagcatcatgcatctcagtgggataaaggacatctctaagtttgccatgcactatataatagaagagattgatgaagacacatcaatggaagacctgcagaaaatgatgattgtggcacttatatacaggttgttagtttgtttctatgagataatttgcatttggggagcagggggagctaccccagggaagttcctgctagggcttcgagttgtgacatgtgacacatcagtactcattgctccaagtcgggttttagtgattccttcctcaaatgttagcatcacaacgtccaccattcgagctttgatcaagaatttttctattgcttcttttttccctgctttcatcacattgctgttttttcagcataatcgaacagcctatgacattgtagcaggaaccattgtggtaaaaagaaatggggtcagatgatgccccaaaaccctgaattccactcttaggaataatgacaagactaaattatgtatcaaggccaacattatctctgcgttacattagctgatgatttaaaaattaaagcagtcactctggtgtggtgcaggggactgttctgaaagtgttgactgtacttaaatgtcaaggaacttttccggaaggaaaaactattaaattcaagtgttaaatatttataggacaacaaaagtttcataatcaatatataggtaaatacatactttaacatttaagataaccaaaatttgctggaagcattttcagctttaaattctctaaatcaaactttaaattttggcttatcctagcgtgattgagaaatatccaattgtgttttataaacacctgcagaactccctcaactcttcttacagaccctgctgcttatgagcattgagaaagagcatcaactcaataacccacttactccctgggagaagagggaacgtgaggaagacctaggagtccctcatcccacacttccaggatagtctagtttggtgcagtagtggcgggatatttcagtttcttactgcttatgtatttggaggcaagattttcatgatgatgaaaatgtactgagtcatatatcattgatattttaaaaaggtaagttagtgattgccttctgggggggaggggttcattgtaaattcacataccctaaaatccaaccataaatacgtgggaggaatatccatcgaacattcccagtgtgtgttctccagcgttctgaatgtacctgtagattctctatgtacagcaaatccctaatgcactgctatgttctctacagtgccataactgtaaaacatcaggtgttagagtgtattttgtgactaacttaaatactaccaggttcccattatgaactgttgtttcatcatctgtggactttagcttctttgagctcatcttggttgtagtatcattgtactttgctctctgttggagaaacaattgggtttatgtctgtgtgcttttgttatgtcacagtcagctagctgtaccaaatgttagtttaaaactttacttcttactcattgttgcatctgattttcccaaaaaacactaaattgtattgcacaagagagcagtctttgttcctgggttttaaacagcaagagcatgccatgtgttgttatatcaatcttaagtgagctttttttttttgacatttaaaactgtgaaaatgcatttaatgtctagataacttttaaatatctcctaatagctcattgttcatcaaccatggtttcttctggtaaataattttatttaaataaaacttcacaggaagcctactatttgtcaagagcagtacatagagcatgtacttgtggctctggcaagactttaaaaagctcttactccacactacaaatcaggaagctgctgcgaacgcctgccactgaacctgcactgacacaattcaagttgaaatgcgcttcacccacacagctctggagtactgattattgtttctactccaattattgtagttttcactgaggatatttttatttatacagtaaaataagtagttaaatttgttataaaaaaaaaaaaaaaaa

SEQ ID NO: 545 - DNA, 2000 bp, Rat
gcttcagacctgggcagcctgtggcctcagcgtgtcgcagtggccccaagcgggttgagccgtagaagaacttgctggggacgttttcccagggcccagcctcatccaagataccctggcattgccaccatcccggccaggatgggcctgctgttccttgtccttctttcaccactttcctgtgttttgggacttccgttctacaacggcttctactattccaacggtctgcatggcaggaccctgggcaatggctatggagaaggcctattcaatggcgtgaagttagtggtggagaccaccgaggagtcattgttcagtcaccaaggagccagtgtgaccctgccctgccactaccactatgagccagccctggcatctccgagacatgtgcgtattaagtggtggaagttgtcagagaatggaaccccggagcaagacgtgctggtggccatcgggcagaggcaccgctcctttggggactaccaagggcgagttcaattgaggcaggacaaggagcaggaggtctcactggagcttcgagacctgcggctggaggactctgggcgctaccgctgtgaggtcattgacggtctggaagatgagagtggcctggtagagctggagctgcggggtgtggtttttccctaccagccccgagaagggcgctaccagctcaacttccatgaggcccaacaggtctgccaggagcaggatgctgtggtagccacttttgagcagcttttccgagcgtgggaggaaggcctagactggtgcaatgcaggctggctacaggatgcctcctcgtgccgattcggcacgagctcgtgccgaattcggcacgaggcctgccggaggccgctgtggtgcggagacccccgggtgaatccaccgacaccatgtctgaccaggaggcaaaaccttcaactgaggacttaggagataagaaagaaggagaatacattaaactcaaagttattggacaggacagcagtgagatccatttcaaagtgaaaatgacaacacatctcaagaagctcaaagaatcgtactgtcaaagacagggagttccaatgaattcactcaggtttctctttgaaggtcagagaattgctgataatcatactccaaaagaactgggaatggaggaagaagacgtgattgaagtttatcaggaacaaacggggggtcactcgacggtttagataattctttttattttttattttttcctttttccctcaatcctttttttatttttaaaaatagttcttttgtaatgtggtgttcaaaatgaaaattgaatactggcactccatctcttagaacatctggtaatctgaattctagtgttcaatattcattattggttgtttttgttgtgctgatttttggtgatcagacctcagctcccttaacattgcccttcttcctttaagagatttcatgtgtgcacacagagaggccaccctttccaggactgtgcattttcagggttgtgatgataaaaggatcgactaatgggagcttccctgtgacctttcaatggccctgcagttccggtatgtggttgcttcactcctggactatgattttcagtgggagatggagatttttcagagaaccgaactgtggaaaatgaccttttctcagcttgaagctacttttaaaatctgagggtctggaccaaaagaagaacatcatgtttgtagtcaaggtaacagatacagtgagagtaacagctaactccaaaagtggcttcactggagagaaagaaagtgtcttgagcaagacagtattgtcagaagatcccaggaaagttctaatcttcatcagcagttaataataaagttactcatacagaagtgtacgcaacagacactgctccttttgattctgttgtactttttggcctgggacatgggttttcaagggacatcatctgtaccagcttcattaaaataaacaatatttgtaaaaccaaaaaaaaaaaaaaaaaa

SEQ ID NO: 546 - DNA, 1340 bp, Rat
tggcgatccgcgcctgcggaggaggtaagatcgataccggcgtcccgcggatggctgtttgtccgtatggggctgcggcggtcgtgatggcactgctctccgccgcgatcgcgttccactggtcgccgctgctagcagttttacaaagagcactgtccctccacacagcgcacgcaacaaaggacatggacaacctttttcagttggtgaggaacattgtgcctgctctgacgtcgaagaaacacaaggggcaagatggaaggataggcatagtcgggggctgtcaagagtacacaggagcaccgtattttgcaggaatctcagctctgaaagtgggtgcagatttgacccacgtattctgtgccagggaggccgcgccagtgatcaagtcctacagcccagagctgatcgtccaccccgtccttgacagttctgacgctgttgaggaggtgaagaaatggctccccaggctgcatgcccttgtcgtgggacctggcctaggtagggacgaccttcttctcaacaacgtgaggggcatcttggaatcaaccaaggccagggacatccctgtcgtcattgacgcggacggcctgtggctgattgctcagcggccagccctcgtccacggctaccagaaggccgttctcacccccaaccatgtggagttcagcagactctgggacgctgtgctcagtagtcctatggacaccagtaatcacagtggatctgtgttgaagctcagccaggccctggggaacatcaccatagtccagaaaggagagcaggacctgatctccaacggccagcaggtgcttgtgtgcaaccaggaaggcagcagtcgccggtgtggtgggcaaggagatctcctgtcaggctccctgggtgtcatggcacactgggccctccgtgctggaccagagaaaaccaacggctccagcccgctcctggtggctgcctggggtgcgtgcacactcacaagggagtgtaaccatctggccttccagaagtacgggcgttccacaaccactaccgacatgatcgctgaggtgggagctgccttcagcaagctcttcacgacctgagccggcgcagactgagtcctccatcgcctagccttgggctcagcagcacttgatggattttagcctgaagtagctgacaggatttaggacgtggctgtccgactactgtagagttgagatgttaacgacactaatctggtctccgtggttttctgggcttctcagaaaagtctgaggagaaaatgagagtaaaccctcccagcagcccacctggattgggctggctctgacacagaaaaaaaaaaaaaaaaaaaaaaa

SEQ ID NO: 547 - DNA, 703 bp, Rat
ttatttttatatcatgaaccttgggatttactacccaagggcctgtggtgacgattgtgttgctgtgaaaagttatgtatcatgaatttgcttaaatactgttttatctgggtaccttgcttatgtcaaggctgtttgatggatgccatgttggtctttgtatcagttaatggttctctatcagataataatcttattctttttatttaagcaagtcagcgtgcggacttgctacctcagtacagaaggaaagccttgcggttcagtcctgttcgcttgtaaatctctgcagcaatgcttacttacagtgctggtcacccctgtataagcgaatcgtgcgggaatacaaaagagcactgaatatgtcggcctttccagaacatcagcagtgcacacctcaagaggctaatattacctttctatttcccaaattcagcatgtcccaaattaccatacaacaaggagacaagcccttctttctactttgccagtgagttgggtttttatactaattttaattacacagtaaacactatttaagggatacatgttaaagtagctaacttgttggagaatattttctttctaccagacagaatcaaagtgtgcatgtctgggctggggtgtggcacagtggtggtagttcttgctctagcatgcaccaggcccggagttcattccctagtacaaaaaaaaaaaaaaa

SEQ ID NO: 548 - DNA, 4170 bp, Rat
ccgatgtctgcagcctccctggccaggcctctcctctccagcggcagctagtccccctcaggacagactcagagtactgacgtcggtcatcattcatttccaaacacgccaggtcacgtgaacaaacttcccagtgacactcgggctgtagctgtacactcttcgaccacgacattggttttctcctaagtgtcaccagtggagacaggatgctctgggcactggccctgctggctctgggcatagggccaagagcttacgctggtgaccacggcgaggacacagcatttgaccttttcagcatcagcaacattaaccggaagaccatcggtgccaagcagttccgagggcccgaccccggtgtgcccgcctaccgttttgtccggtttgactacgtccccccagtgaatacagacgacctcaacaggatcgttaagcttgcaaggagaaaggagggcttcttcctcacagcccagctgaagcaggaccgcaagtctcggggaacactcctggtgttggaaggtcccggcacctcccagaggcagtttgagattgtgtccaatggcccaggggataccttggacctcaactactgggtagaaggccaccagcataccaacttcctggaggatgtgggtctggctgactcccagtggaagaatgtgactgtgcaggtggccagtgacacctatagcctgtatgtgggctgtgatcttattgacagtgtcaccctggaagaaccgttctatgagcagctggaagcagacaagagcaggatgtacgtggccaagggtgcatctcgagagagtcacttcaggggcttgctgcagaatgtccatctcgtgtttgcagattctgtggaagatattctaagcaagaaaggctgtcaacacagccagggagctgaagtcaacaccatcagtgaacatacagagacactccacctgagccctcacatcaccacagatctggtggtccagggtgtggagaaggcacaggaggtgtgtacgcactcctgtgaagagctgagcaacatgatgaacgagctgtctggattgcacgtcatggtgaaccagctgagcaagaacctggagagagtgtctagcgataaccagttccttttggagctcatcgggggccctctgaagacaagaaacatgtcggcctgtgtgcaggagggacggatctttgcagaaaacgaaacctgggttgtggatagttgtaccacctgcacctgcaagaaatttaaaacagtctgcaatcaaatcacctgctcacctgcaacttgtgccaacccatctttggtggaaggcgagtgctgtccatcctgttcccactctgcagacaacgatgagggctggtctccgtgggcagagtggaccgagtgttctgtcacctgtggctctgggacccagcagagaggccggtcttgtgatgtcaccagcaacacctgcctgggcccctccattcagacaaggacatgcagtttgggcaaatgtgatacgagaatccgtcagaatggaggctggagtcactggtcaccctggtcttcgtgctccgtgacttgtggagttggcaatgtcacccgcatacgtctctgcaactcaccagtgccccaaatgggtggcaagaactgcaagggcagtggccgggaaaccaaggcctgccagcgtgctccatgcccaattgatggccgctggagcccctggtccccttggtcagcctgcacagttacctgtgctggagggatccgtgagcgcacacgtgtttgcaacagccctgagccccagtatggagggaaggattgtgtcggggatgtgacagaacaccaaatgtgcaacaagaggagctgccctattgatggatgcctatccaacccgtgtttccctggagccaagtgcaacagcttccccgatggctcctggtcctgtggttcctgcccagtgggctttctgggcaatggcacccactgtgaggacctggatgagtgtgctgtggtcgcagatatctgcttctcaattaacaaagcttcccgctgtgtcaacaccaaccctggcttccactgcctgccttgtccgccacgctacaaggggacccaacccttcgggattggcctggaggatgctaaaacagaaaaacaagtatgtgagccagagaatccgtgcaaggacaagactcacaactgccacaagcatgcagagtgcatctacctgggccacttcagtgaccccatgtacaagtgcgagtgccagactggctatgcaggtgatgggctcatctgcggggaggactcagacctggacggttggcccaacagcaacctggtgtgtgctaccaatgccacctaccactgcgtcaaggacaactgccccaaactgccaaattctgggcaggaggattttgataaggacggaatcggagatgcttgcgacgaggacgatgataacgacggcgtgagcgatgagaaggacaattgcccacttctcttcaatccccgccaattagactatgataaggatgaggttggagaccgctgtgacaattgcccctatgtgcacaaccaagcacagatcgacacggacaacaacggtgaaggggacgcctgctctgtggatatcgacggggatgatgttttcaatgagcgagacaattgcccgtatgtctacaacactgaccagagagacacagacggtgacggcgttggggaccactgtgacaactgtcctctgatgcataacccagatcagatggatcaggacaatgatctcgttggagaccagtgtgataacaatgaggacatagatgatgacggccaccagaacaaccaagacaactgcccatacatctccaactccaaccaggctgaccatgacaatgacggcaagggggatgcctgtgactccgatgatgacaacgatggtgttccagatgacagggacaactgcaggcttgtgttcaaccccgaccagaaagactcggatggcgacggccgaggtgatatttgtaaagatgactttgacaatgataatgtcccagatattgatgacgtgtgccccgagaacaatgccatcaccgagacagacttcagaaactttcagatggtccctctggatcccaaggggaccacacaaattgatcccaactgggtaattcgtcaccaaggcaaagagctggtgcagacagcaaactcggaccctggcatcgccgtaggtttcgatgagtttgggtctgtggacttcagcggcactttctatgtcaacactgaccgggacgatgactacgccggcttcgtctttggctatcagtcaagcagccgcttctatgtggtgatgtggaagcaggtgacccagacctactgggaagacaagcccagtcgggcttacggctactctggtgtgtcactcaaagtagtaaactccacgactggtactggagagcacctgaggaatgccctgtggcacacgggaaacacggaaggccaggttcgaactctatggcatgaccccaaaaacattggctggaaggactacaccgcctacaggtggcatctgattcacaggcctaagacaggctacatgagagtcttagtgcatgaaggaaagcaggtcatggctgactcaggaccaatttatgaccaaacttatgctggtggacggctgggtctgtttgtcttctcccaagaaatggtctacttctcagacctcaagtatgagtgcagagatgcctagagagcagggttccagctccagcagtgtgctgccaacaccccttcctggacgcatcggtccatcttggccctcgcagctcttctgccatgcagcatttcctgtttcttggccttacctgagtggatcttcacctccttcatcagcactgaggtccagtgccttccgaggctaagcacctagggagccccaagaggagcatcaagcctgctgctggggaacagttggaggagactgaggctccctgcggagcggacacggagctgtcgctgcattgccctttcttgtttgtttaaaaagaatgacgtttacatggaaaatgtaattacttgcagtatttatgtgtatatggagttgaagggaatattgtgtataagtcattctcataaattaagcatgaaaaataatcgctcacctacttccagtgcttaaaaaaaaaaaaaaa

SEQ ID NO: 549 - DNA, 2130 bp, Rat
gcacggtgcagtccccgcaggcgccatggaactgctatcccgtgtcttgttgtggaaactggtgcttcttcagagttctgcagtcctgtcctcagggtctccagggaccgcagcagccagcagctctgtggtgtctgagtctgcggtgagctgggcagccggaactcaggcggtgctacgctgccagagcccgcgcatggtgtggacccaagaccggctgcacgatcgccagcgcgtggtccactgggacctcagcggtggcccaggtagccaagggcgccgacttgtggatatgtactcggccggggaacagcgcgtgtaccagccgcgcgatcgcgaccgcctcctgctgtcgccttctgccttccacgacggcaacttctcgctgctcatccgcgctgtggagagaggcgacgaaggggtgtacacctgcaatctgcaccatcactactgccacctctacgagagcctggctgtgcgcctcgaggtcactgacgatcccctattaagtcgcgcatactgggacggagagaaggaagtgttggtggtggccctcggcgcaccggctctgatgacttgcgtgaaccgtgagcacttgtggactgaccgccacttagaggaggcgcagcaggtggtccattgggaccgacagctacctggcgtgccacatgaccgcgctgaccgattgcttgacctgtacgcatccggcgagcgccgagcctacgggccacccttcctgcgtgatcgcgtgtcggtgaacaccaacgcttttgcacgcggggacttctccctacgcatagatgacctggagccggctgatgagggcatctattcctgccacctgcaccaccactactgtggtctccatgagcgccgagtcttccacctacgggtcacggagcctgtttttgagccaccagctcgcgcttctcctggcaatgggtctggtcacaacagtgttcctagcccagatcccaccatggcccgtggccacagcatcatcaacgtcattgtcccagaggaccacacacatttcttccagcaattgggctatgtgctggccactctactgcttttcatcttgctgctcatcactgtagtcctggcgacacgccaccgtcacagtggaggatgcaagacctcagacaggaaagctgggaaatcaaaggggaaggatgtgaacatgatggagtttgctatagccacaagggaccaggctccgtataggactgaggacatccagctagattacaaaaataacatcctgaaggagagggctgggctggcccacagtcccctgcctgccaaggacgtggatctggataaagagttcaggaaggagtactgcaaataaatggaccctgagcttctggctgggccagcagctctgcatcaaaggacatcttcctgaccctcctgtggtattcctggctcttctcaacggctggtccggcttacctagagacttggcttaaacttggcagagcagctgcctgtactttgctcttcctagaatcacccccctcatgttggtgagcaactgtgggttccctagggactctggtatagtatcattgctgcccttcaatcacctgtgcccactgggggctgtaccccaacttcaacacagcaaaaaatccctcattaatatccaccaaacgcaaagtcccccgtggcctcttactgctaggatcgggaagacactaacggattccagttaagactcctagcccctagttaaacacattaaccactgtcctggtaagactgcactacgcctgtgcactgctcaggggcctgctgtcatgctctgactcgtggccctccttgctgctttgggcaacttggggcaggcccatggccctttctctgcttcgtgattcctttctgtccaatgctctccaagagccacaccaacagttactggggaccatgtgactcttagtcttcatatcacttccctaggctggagtctgggattggggtcccatttgtgctcttttttgactgaggatgggatgaagagggatctgaggagcccatggtgcacatcaaacagctatcatttgctcctactggggaagttctcatgtgataataaaagatatatctgaaaaaaaaaaaaaaaaa

SEQ ID NO: 550 - DNA, 1639 bp, Rat
taagcccgcctgcttcattagagtgttattgtcaactctcctaagtgccttgatctttgaaaaataccttgtttctgtgaattaggaggagctgggggcaggggctgtttgccatcttcagggcctgactggacggtggatatggcgcacgcaactgccctggtgcactttgcagtagtatggaaggaactaaatgtgtgggttctgctgacacctttctggggcactttgtggcatgcattgcttccttcctggtaagccctggaacggagggctttcaggacactccagtgtgggtgcaggcattcacgtagggacagtctggcctggaggtcaggggaatgctcagcaggctggtacctacctcacaaggcaggacctaagtggacttttgcgattatgcagaggatggagaaggtccttgtcaagcattggctgttcccattctccttccccaccctactttcacctcttcccatgagtcctgggtgccagagccttgaggccagaggtgcccaagcttaggtgcagggagagcatagaggctgggaggacaggtcggagtgcagggttcattccctgtgtgacaccctttcttcccgtctacttactcccaggacttcattctagcagaggggaataatagctctatctggtctgtctccataattttgagaggatagcgatcttgagtatgggaacctccctgtccccaggacgtgtatgcctagcacttgctcctccttctctccactatccacccccagagaggagtcagagccataactcagtcacccagtcccctccaaagatgtacaatatcctcagactagagaggaactgctaggcctggtagctcctgcctgtaaatccagcactcaggaggctgagtcagaattactcaagggagttcaaggccagcctgggctactgagacctggtctcaggacaactcaaaactaggcttgggtttgagcactggagacgatagcttagtcggtagtgtgcttgcctggcatgtacaaagctgggctccaccccagcgccacataagccaggtgaaagccttgggaaaaagtggtaaggaggatcaggcattcaaggtcaccatcagttacctggcagggttgaggccagccaaggatacatgagacttcttgaggaaaacaattctgagatgagatagattgtctttgtctctgcccaaagcctttggaagcaagacactcatccttgctgttctgctcccctgcggagctcagcgctctggaggtgaggtgggcattgagggcaagaagctactttgctgtgtgacctcagggtcctcaaggagaagcccacctgtcttcctctacaccaaaggaggcagcaagaggtgtgtccagttggggtgagagggtcccggtgagtcacttcaatcccacaaccaacctttccatggttgaatgcaataaagtgacaccagcagctgttctttagaactgggtttctgaccatgaggttatggtcatgggcagtattaccaccttcacttattgcttctgttatccatcatttttgttttgttaataaaatatctatttactcccaatatcacaataaattatttgatctaaaccaaaaaaaaaaaaaaaaaaaa

SEQ ID NO: 551 - DNA, 2802 bp, Rat
gaacagcagtatccacgtggggcttgctgctgtggggagcaaaactgtgtaatccgtgtaacttagatagcaagtcactattctgtcctctcctgggacctgcctgaaaaagagagaaaaagaaagaggagctcattaaaagaaaaaccaataaggcctccccacatgcccatgctgtttctgaatgttctttgggtgtgccgggcccatccgtggacatggaaggacagaggtgcaggcagctgtgtcctcagacagtgccggccctcagggaaggtgctgttcttggctgttgctgtggttctgactgggatatggctcatccaaagatgattccagatatgggagtttgctcctcttcatgaaatcatgaatgacaaggtcccacagaaagctcttaggtcattctcgggctccagttgctctctaacttcctgttttacagtgtgatctgtgaccatcacagtgtcttctgccaagaagccttgaagagctaccaccactgcatgaagttcctagccttgagtttctcctcgagtaccagactaatagactctcaaatgcagaatgtcagttctcttccccttcccattagtcattttaactggaaaatcaaagaggaaaagttatttaaagtggtctcaactgggattttccaggcccaagggagggggtttgcaaaggagagtgggctggatgatgatggtcttactgaattttttctgagtttatcatggatcctaaagttgggaggatatagattggtgggggtagcaaactatagctaacagacagtgtgtcttaaacaactttctgcattaacctactgccatagagaactacaaagcaaaagactagcttgtcgctttgtttttttctttttattctttgtgtgaggttcatatactcgggacccactcatctctccatcccctcattcttgcagtgtccccccaaaaacacacaacaagaagacaaagcctagaaaacctcttgtcctggaaactgtagtgtgtcccacgacaaacccctctatccacatatctcattggtctggttcgaggtctgctttctatgaaaccatcaatattgaatcctcacaatggttatccttttgttgtcctgtgccatgagatcctgcagttttggatcggcaggactgaccctccgtggttcacagataatgcagactttgaggtgggccaaatcaaagcccaggatctgggtgtgggtgacagctgagcccactggatttccctcacctaccccaccagagcgagctctccagcactgctcgggctaggccgcccaatgccgccattgacaggaggcagggtcagctcttattctcatgcccttggagctgtatcaccagcacccacaccttcatagccagctccactgtgctcccaggcaaggtgcaggcccctttctcccgagtgctgcagctggtgaggggcagagccagctctcccaagctcatgaccctgtggggagctttcccccctgccagaggtgatgaggtgctgggcaggggctggaacattacctccgtgcctttgccatcccacagcagacaagtggcagggtcagcctcccacactcatacccttggggctgcctcacccacacccctgtcaccagggccagctccactgtgctccaccatgctgcctgggcaaggcacaggacctactctcccgagtgctggcacagtacctgctctcccgagtgctgccacaggtgagggatggggccaggtctccagaggtccacatccagtgagggatggggttgtgcacatcccctggacatgcacatggtgcctcatggctgccccaacaaggaacacccccatgtcctctattggtaatatgagccatggacattagatatgagctatgttgcaacagacccagatgtagccctcagcggcagcaatggctgggacctcatcatggccccaggctggccactcagaacaggctccccgtccccatccttccttctcagttccatctctttgtaatgctcaagttgctccacttctcactctcccctccaagcaccacataactcacagtactgccctgcccctgcctgatagaaaacaccaccaccaacatggtgtctctttgcccattgccagggaggcaaaagactgtttgcccaagccaatgcctagaacattggccctgcaactgtaggtgctacacacatgataaagctcttacgtgtagagcaaagtcgtggacgaagaggcggcagacgcatgattggcgtgtgcccgaagcctttgttcttacccctaagcagcagctctgcggccgtggtactgtcacaagcagcaggttctgttgatttctgtaacagacacagaggggatgctctcctctcataaccatagcaacttggctgcacaggtgaaagagagcatgtggttggtgagtgtacatattatatattcccatatccataaatgctgtcttttgtcatcagagagggctgtgtgtgtgcacaagcacatgcgtgtatgtgcatatatgtgcatttttttaataatcccagcagtttttcagctggagtctctctccttccgtcagtttctgtttccttatttgaaaacttagtgatgtcacagtacttactgcatgagtcttccctcttccataagcacaaatctgatcaaataatgatgtgaccttgcattattccatcaagcattcttaacagtcatctccctccctcattgatggtgccttagaataaagtccttactgagacgtcaaaaaaaaaaaaaaa

SEQ ID NO: 552 - DNA, 1178 bp, Rat
tttttttttttttttttttggtttgtttgttaattaaaacagcaataggttcctgcctgggaaaaggctggaataggcaggtcttacttcacaaaaatatattttcttcctcttctttttttttttttttaaaaacaccaccaaagtaaacctattagcttccatgagctggtcacacctggacagttggtagagctcccgtgtggtcttgagcaaagagcttgagccatcctgcagactgcagcctgagcgctgtgtgcctgcagactgcagcctaaggaccgtgcctgcagactgcagcctgagcgctgtgtgcctgcagactgcagcctgagcactgtgtgcctgcagactgcagcctaaggaccgtgcctgcagactgcagcctgagcgctgtgtgcctgcagactgcagcctgagcgctgtgtgcctgcagactgcagcctgagcgctgtgtgcctgcaaactgcagcctgagcgctgtgtgcctgcaaactgcagcctgagcgctgtgtgcctgcagactgcagcctgagcgctgtgagcctgcagactgcagcctgagcgctgtgaacctgctggtacccagggttaagtgatcagctccaaaccatgcaagaaaaaccagcgacacccacaaagcaaaaggcaacaaagataatagtttaaaaagaaaggcagataccaccagaggtggtaaccaggggctatctgagggcagtgtgcccctcagagacctggccagtgctgggtgaaggccttgggcagctcaacatatctcccaggaaagtcttaggggattcacatggctcatccccacagtgtgtcctcagcacctgagacaggatagagatgtccctgatccaggccatagtgtacaaagtccattcattcagttgtgatttagaatatatatacaacctggatggcatccaggtccgtaacaaggctataggctgtccacagaggcaccagctgcctgctcttcaagaagcaacagcatttgctggggtacacaggcccctccaaattcatcccttgggtagaggcctgagaccctgggagcagcaacagcagaggcactgtgggcacatatggcctggctgggagcccctgaggtctgattctttggcacttgggacagctagttgcgagacaaacaggaacagccccttaat

SEQ ID NO: 553 - DNA, 1600 bp, Rat
cccactggctctgaatctctcacctccatagaacagcctgttatccctaaaaccagggccgtcggggtagatcaagtaagccttctatcaagaccccagaaccaattgtccccactggtcctgaactgcagcctcttacctctgcagaacagcctgtcacccctaaccttacatctcgggcctctcggggtaggtcaaataagtctatcaggaccccagaaccagttgtccaaactggccctgaattccatccatccacttcctcagaacagtctgatacccctgagccctcatctcagggcaggacacgtaggtctgtcaggactcctgaagcaagtgtttccacaacccctgcactccagccttccacttctaaaaaacagcctacccccaagcccacagctctggtcactcggggaaggacacataaaccctccactgaaggtttggaatcagttgggccagtggcacctgattttgagcctcccacctctacagaccaccttgccacctctaaggtgacaggtcagagcttaacactacaatcttcacccgtaagtgcttccccagtttccactacccctgaactcaagcctcctgtccccatagcccagcctcttaccctggagccagttccacaaaccagtcaccaaaggaggcgaagggctactgggaagcagggctcccgcacagctcctgttggtcctaagtcttactctacccccgctgaacctgaaccccagtcttcagccagccaaagctcaggagcatcagaagcagattcaccccatcaaaaacgtccccgaagacaagtcacccagaaaactgtagtcgtcaaggaagaagatcctggagaaatacaagtgaaggaagagcctcaggagacagcaatttcaacaccaggcaagagaaagagggaccctgcagagggggaaacccagggaaacccaactcgaagccggcgaactaagcctaaccaggaagcagcagcccccaaggtactgttcacaggagtggtggattctcgtggagagcgtgcagtgctggctctaggaggcagtctggccagctcagtaaatgaggcctcccacttggttactgatcgcatccgcaggacagtcaagttcttgtgtgccgtggggaagggaattcccatcctgtccctgaactggctctatcagtcccgaaaggctggttgcttcttgccgcctgatgactacttggtgactgatcctgaacaagagaagaattttagcttcagccttcgggattccctgagccgggctcgggaacgaagactactggaggactatgagattcatgtgacccctggagtgcagccacctccacctcagatgggagagatcatcagctgctgtggaggcactgtcctgcccagcatgccccattcctacaagcttcacagagttgtcataacgtgcactgaagacctacctcgatgtgctattgcatctcgcctggggctacccctcctctctcctgagttcctcctgactggagtgctgaagcaggaagccacaccagaggcctggtcctctccaatttggaaatgtagtctacctaaaaaaaaaaaaaaaaa

SEQ ID NO: 554 - DNA, 2401 bp, Rat
gaggccacagttatcaccacggagaagagagagaggccagcgccccctagagagctcctggtaccccaggcagaagtgacagcacgtagcctccggctccagtgggtccctggcagcgatggggcctccccgatccggtactttaccgtgcaggtgcgagagctgccgggtggagaatggcagacctactcctcgtctatcagccacgaggccacactctgtgctgttgaaaggctgaggcctttcacctcctacaagctgcgcctgaaggccaccaacgacattggggacagtgacttcagtgcagaaacagaggctgtgaccacactgcaagatgttccaggagagccaccaggatctgtctcagccacaccgcacaccacgtcctcagttctgatccagtggcagcctccccgggatgagagcttgaatggccttctgcaaggctacaggatctactaccgtgagctggagtccgagacaggcctgagccctgaacccaagacactcaagagcccctctgccttacgtgctgaactcacggctcaaagcagcttcaagaccgtgaacagcagctccacattaacgacctatgaattaacacatctgaagaagtaccggcgctatgaagtcatcatgactgcctataacatcattggtgagagcccagccagtgtaccagtggaggtcttcgttggtgaggctgccccagcaatggccccacagaacatccaggtgaccccactcacagccagccagctggaggtcacatgggacccgccacccccagagagccagaatgggaacatccaaggttacaaggtttactactgggaggcagacagtcgtaatgagacggagaaaatgaaggtcctctttctccctgagcctgtggtaaagattaaggatctcaccagccacacaaagtacctggtcagcatctcagccttcaacgctgctggtgacgggcccagaagtgacccatgccagggacgcacacaccaggcagctccagggcccccaagcttcttggaattctcagaaataacatctaccacactcaacgtatcctggggggagccatcggcagccaacggcatcctacagggctatcgagtggtgtatgaacccttagcaccagtgcaaggcgtgagcaaggtggtgaccgtggatgtgaaagggaactggcaacggtggctgaaggtgcgggacctcaccaagggagtgacctatttcttccgtgttcaggcgcgaaccatcgcctacgggccagaactccaagccaatgtcactgcagggccagccgaggggtccccaggatctccaagaaatgtccttgtcaccaaatctgcctctgagctgacccttcagtggacagaagggaacacagggaacacacccactacaggctacgtcatagaagccagaccatcagatgaaggcttatgggacatgtttgcaaaggacattcccaggagtgctacgtcatacaccgtgggtctggacaagctgcggcaaggggtgacctacgagttccgggtggtggccgtgaacaaggcaggctttggggaacccagccgcccttccattgcagtgtcagcacaagctgaagccccgttctatgaggagtggtggttcctgctggtgatagcgctctccagcctcctcctcgtcctcctggtggtcttcgtgctggtcctgcatgggcaaagcaagaagtacaagaactgtggctcaggtaagggcatctccaacatggaggagacagtgaccctggataatggagggtttgccgccttggaactcaacagtcgtcacctcaatgtcaagagcaccttctcaaagaagaacggaaccagatccccaccccgaccaagccccggaggtctgcactactctgacgaagacatctgcaacaaatacaacggtgcggtgctgacagagagtgtgaacctcaaggagaaatcggtggatgggtcggaatcggaggcttctgactcagactacgaggaagccctgcccaagcactcctttgtcaaccactacatgagcgaccccacctactacaacttttggaagcggcgtccccctgccgcagcaccgcacaggtacgaggcggtggcaggggccgaagctggcccgcacctgcacacagtcatcaccacacagagcgcgggcggagtttacacaccagctggccccggagcccgggcccccctcaccggcttctcctccttcgtgtgacgtcacgcctccatcagggtagacgggtgcagaacttctggagtctatttttgttaagacaatcaactccgataactgagctgaattttttttgtttaaaaaaataataataattttgataagcgaaaaaaaaaaaaaaaaaaaaaaaaaaaaaaaa

SEQ ID NO: 555 - DNA, 2729 bp, Rat
gccggcgaagcctcaacaaccccagattcccgcgccccaaatccttgaagccccccaaattctccgtgggctccgaggacttcggaaccccagcagctgcagctctccactctccgaggtccagcaccccgaagtctgctctcgcactatgcagctaaacaggttcttttccggtcctggtctgtttttgctgctattttgcagtctctgtgtcgaggctgaagttaaagaagtcaatgcaatggtggggagcgatgtggagctccgctgcgtttatcctcggagaagccatttcagcttggatgatctgtatgtctactggcaaatcgtcgatgaagctaaaactgtggtgacgtattacctgcccagtgctaacgagtcttcgacaatccatgtgagcaactcctacaagaacagggcccatctgtcaccggacctcatgaaggagggcgacttctccctgcacctgcagaatgtcacccctcaggatacccaggagttcaagtgcttggtctttaggatgtccacagtgttaggcaaggccttggaagaggtggtcagactgcgtgtggcagcaaacttcagtacgcctgtcatcagcacctctggcagctctgaccctggccaggaacgcaccttcacttgcatgtccaagaatggctacccagagcccaacctgtattggatcaacaggacggacaataccctaatagacgagactctgcagaataacacggtctacttgaacgagttgggcctgtatgacgtcgtcagcacactgaggatcccttggacaccccatgtggatgttatctgctgtgtagagaatgtggctctccaccagaacattactagtatcagccgggcagatagtttcactggaagcatgaacacagagaggccacaggaaatccacagagaggctacaaaggtccttttctacgccctagctgcacttctggcggtagtggttgtcattttcatcatcgtgctgtacagatgcaggcgtcgtccctgccagagctatacaggacccagggctgtacagcttgaactcacagaccattcctgacagaactctgcccaggatgtggacagggtttctaatggactcccgcaggcctggtgacagaggacaatgagctgtctgcttacgtgctgtgatgaaggccaggaatccctggctttccgaggcttgatcccagaaacccccgagggagatctcttccagtgggcggtgtcatcagactgtggagcctcccgtgagcacagagaggaagcagcttgtgagaagatccttctcctgccagatactcagtcccaggatctttgaaagagggcatttgagccactccgaaagcacctacaaaatctactggagactgtttccctgcaggaccttccgtgagggaggaagcttgactttatttcagtctcaagctcgttgggcctcctagaggatatgtatggggttctgtctacagaaaacctgctgctggctgacaatgactgggctcagagattaggggcactcggccttgcaacatcaacgggacatgcctcaaggcaaaatatggcccgtctgccacacacaagtgcttctccatcattgaaggccctcaaacctgacttgtggtggatataaaagcttctcgaaagccttgagctctttcagtctgaacacaaaacgggaggtcagctccactcagtctcagcagcccatggagacctcagctcctgtgtcctgggtctctccacgttgttggccaaaatagagctagatgttttgttttccagatggttccgcaaagttggctgcttggaaacataggtgtgcacaagctccaggttgacgcattaggcagcatggactcaccaatgggacacagttccttcccacccagaggctggacatcctagacagtcggggcctgctatatggctggggctcagtgctgacggatatgagaaatcttcggaacgaggagtgagaaccctgggctcgggctcaaggggaccagtattatgaagacctgtccacatggactctttcttcttcgtgtcgacttcttcaatgaaacgtctccctgcaaatgaagcattacttaaacccgtagaacagcaactgtccttgtgggtcttgagttgacagctacagtaaacgaccgtaaggagcagttggggtgcaaggagctggggtgcagtgcccctaggacagatgtttgggaatcagcggcctccccgaggcccatagttccaggacacagccatgtctcagctgtcccaggaactctggtgcatctatagggctcttctgtctactttcactcccccccaccccccatcaggggtagtttagggttagaagaggtcaacccagtgagccagccagctgccgtggggcaccagtcactgcacccccccttccccatgcctcctgcttatgtcacactgggaaccctttatagaccactggccctgtagtcaccatcacctgctgatcccaacagtcccccaccttcctgtggaatcctgggagcacccccccccccttacccttagcacatcagcattcgtgagacttgcccttgtaacccctgactccttcagcccagaaccttgcggtcactctttatctaagtttgtaaatggggcatagtgacttccagaaacccgccaagggaataaacataagatgtgctgtcaaaaaaaaaaaagaaaaaaaaaaa

SEQ ID NO: 556 - DNA, 2494 bp, Rat
acttgaactggcagataaaaaagtatgacaccaaggcagcttactgccagagcaagttggctgttgtcctcttcaccaaggagctgagtcgccggctgcaaggcactggtgtgactgtcaatgcgctgcaccctggcgtggccaggacggagctggggcgacatacaggcatgcacaactctgcgttctctggcttcatgcttgggcccttcttctggctgctgttcaagagtccccagctggcggcccagcccagcacatacctggctgtggcagaggaactggagagtgtctctgggaagtactttgatggactcagagagaaggctccatctcctgaggctgaagatgaggaagtagcccggaggctttggactgaaagtgcccatttggtgggcttggacatggctcatgggtcctctgggagaggacattccatctccagataaccttcagaaatccagatggagcctcatcatcctctaggggcagtgttggtattgttagaatctcaagactgtggatgttggctgccatgaccctcatcatcctctaggagcagtgttgtactactcgaactgaagactgtggatgctggctgccatcctctgggtggctgtgttggtcctagcattattgttagctggctgctttggtttggaccacgggatggcaggcacatgtactcttttggttactggggagatagtccattggtgcctcctacaggaatctaaaagcggggaagctgatggaggagtcagtcactctagttatgggcagtgtccaaagacagtggacaccaaagctgcagtagtggactgattgatccactgtgaaagagcaagtaatcagacaaatatggctgtagagctttgtgggcccttgcacatgtctgcctcctctctgacttggctgttgttctagtttgctttctgttgctgtgataaataccatgaccaaaatcaacttggggaggaaaagggcttatttaacttacaggttatagtttaccatggaagagggaaaccagggaaggaactcaggacaagaacttgaagcagataccagatacaacggaggtttgctcccaggcatacatcagatacctttattttatttttattattgttatttttttatagagagggtctcactttgtaaccctggcctccctggaacttgctatgtagatcaggctggcctcaaactcacagagacctgccttctgggattaaaggcttgaattattaggcttggcccaggtaccagtgcagcctacctgcccagggatggcaccatctgcagtggggttctacctcccatatcaactagcaatcaagaaaatgctccacaaacattccctcagggcagtctggtctaagcagttcttcaggcgagggtctgtctgtctatcttctaggtatgccaggttgacaaacaaatgaaccagacggctcttgattgcaaactgcaaagggtgtctgctacctcagggatggtgtgggcctgaagctcttgcccaactcagtaaagggcagctgtggacacttgtgtactggacactggctgaggggctgggatccagtggaaaccctggcctttgttagccctgaagtaatcaggacagaatggagtgaaaagctgctagctgctgcctcagaaaatgagtgtgacctgggatcacgatctctccagttcctgtgtaattttaaccttagcctctcaagcatgttgtttgattataataacaagctagatagaggtagtggcacacttcagtagctccagcacttaagagggagaggcaggagtatcaaaagtccaaggtcatccgaggccagcctgggctatatgagattctgccgaaacaaagcaaaacggtgagatctccaaatggctgattcatagatttaaaataaagacatacatttagtgtgcgagtgtgtatactatgtgtgtgtatgtgtacgggtatgtgcacgtgcccttgtatgtgcattacatgatggaggtcagaggacaacctgtgggaatcagttctctcttcgtgaatcccgaggatccaactcagtttgtcaggcttggtggcaagggccttcacctctgaaccatagtgccagccctgagtcatagggtttttttttatcctttctgtatgggatttattccacatacaacttattctttattccttttaagaaactaagacattcaattgttgacaagacaatgattttccaacaactccctcgtatttctcatctatcctgttctgcttaaattaggctagatcaacttcccctttcccccctttctttgttttgagacagagtttcactctatagatcaggctaaacttgggctctcaggctccttgtctaagcctctggagtccagagatgacgggtctgccacaccctgcgtttacaatcagtgtttacaatcaaataaatggaaataaacatttctatcaaaaaaaaaaaaaaaaaaa

SEQ ID NO: 557 - DNA, 2198 bp, Mouse
gttgttacttcagttgctctcggcgggaattcttaaactgcatcctgagtgagggagctttggcgagaaagcaagacccagtggtagacagattagcattactgtacagcttctttgggtgttcgaggaagcccggctggaccatagtggccacggcggtgaggtaggcgtggacagggctgaccagtccaagttaaggacgttcgggtccatgttaaccctgccttgtacgtccagcatcgtaagaaaaaacacttgagaacccgaagaggagatggagtctgcaaatactttgtgtccaggcaggaagtgcaaaggaggtgttttagctcacctggaaagactagaggctcaaacgaacatatcgaatagaaagtctgaagaaccagcagttcgtaaaaaggaaagttctcttagaaccaagattcgagaactgcggcaacaacgagataagctgagggcagaagtgaagcagtggggagccagagttaaagaacctcctgccaaagaagacccaagcagaaccgtgatcagtgaacaggaagttctggaaagggagtggagaaatgtggacgccattctggaggcatatcgctttacggggctcagcgggaagttgaccagtcgtggcgtctgcatgtgcatcagcacagcctttgaggggaacctactagattcctactttgtggacctcgtcatagagaaaccactccggattcatcaccattccgtcccagtcttcatccctctggaaaagatagccgcagcacacctacagactgatgttcagcgcttcctgtttagactctgggaatacctaaatgcctacgcggggaggaagtaccaggcagaccaacttgagagtgacttctgcgatgtcctcacgggacctttgcagagaaacgccctgtgcaacttgctgtcgttcacctataaagtggaacagagatgccagaccttctccttcagtgccaggttgctgtatgaggaccccacagcagctcttcccacgaatgtcactgtgacaaggccaggtgtggaggcatcatcccctccttgggaagagcacagagcatcccatcagatgctcttccgtaccaagcccctgcacaaggtgtttgcttcattttccaaagaaaccgaaaagctgcatttgaacctggtctcctgaaaaactgtttctctatttgggggacagcagaaatgaacacacttgtgctgcctccagttcaggaccagtcagcaaaagctgttgggagagtgcttgcctggatgccaccatgagaacagatacccacgtcatgggaatgacagggagcttgcgtgtacacatagacaagtccgtatctgtaggcactgggcagttggaacagttctccaaagtggccgcttgttcactgttcactcagcccagtgctccagaatatctcttcctcctgtaagcaccagtgctgacttggttgtatgcatatgttcttgctggaatcagctagaatgggggtaactgaagaccttttgtaagcatctctagctttcctggaagctataaatccatgatagggcttgtggttaagaagggaattttttagtcttgggtttggagcagcatgtgctgggccactatttggtgagagacagtatttttatacttgggggttctatgtatttaatgtttcctaaaacagttgggcagagaacagcatgcgtaaagtccttttaaggaaacactgttggaaatctacacatagatcaggggacgctcctctgtcatggctgtcctcttcccatttcctagagactgttaatgtaccttttctctttcaccacggctctgtgctgtgcagtgtgtgttgttcctcggcttagggcttcttgacatcttaggcctgcctgctggtcatgccctctcattacaacgcctgcgctctatgatagttagtcccagataggatctttactccacaggcccagcgtttgggcttcactctaacttagctgcttcctagaaatctccatgtgtcggagctccagcaaactccaggaagaatgcatggaacgtaagccatgggtcccctaacaggtttggaataaaaggttcatggtctgtgtcacagtaacagaattgccacaacagtctcatcaagttgagtaaagcttttaataacacagtcctgttctttatcaaaaaaaaaaaaaaa

SEQ ID NO: 558 - DNA, 1683 bp, Mouse
gggcatagaaggcatctcgaaaagaatacttatttgaattgaaggaagatgaagaggcctgcaggaaggctcagaagacaggagtgttttacctctttcatgacctggatcctttgctccaggcgtcaggacatcgatacctggtgccccggcttagccgagcagagttggaagggctgctgggtaagttcggacaggattcgcaaagaattgaagattcggtgctggttgggtgctccgagcagcaggaaccatggtttgctttggatctaggtctgaagagtgcctcctccagccgtggacaagtatcgctgctccagcagcttgactgctgtaaagaggatctggagaaatactgtgctacgcttgccaagctaacctgagagtcacctaagtactcgttaaaagtgttttcactcttccaacattcagcctccttgccgaaatctgaaatggaagcagagctgggaggttctttcatcaagctgaggcaggctcttttccagctgaactcggtggactcctccttgctgttcacggctcaggctcttctccgctggcatgacggtcatcagttctgcagcaaaagtgggcagcccacccagaagaacgtggcgggcagcaagcgagtgtgtccctccagtaaaatcatctattatccacagatggcgcccgtagtgatcacactggtgtcagatggggcccgctgcctacttgcccgccagagttcctttcccaaggggttatattctgccctggcaggtttctgtgacataggtgaaagtgtggaagaaactgtccatcgagaagttgcggaagaggtgggcctggaagtggaaaacatacagtactctgcgtcccagcactggccctttcccaatagctcactcatgatcgcttgtcacgcaaccgtgaaaccaggacacacagagattcaggtgaacttgaaggaactagaggcagccgcctggttcagtcttgatgaggtgaccacagccctgaggagaaagggctccttggctctgcagccgagtgaggcttccccactgttgctgcctcccaagttagccattgcccaccacttgattaagaagtgggtggagacgcggagctgttcttccctggctgcttagctcaaatggagccgtctggatccctcctgggcattgctgcagggcactctggagatgacctgcgaagggaggtgacaaagccttcccgggcagaggctctctgagaagttccactgcctaaagccttctaatgctccaccaaaaatgttggtgtgaactggatagagcagcttgtacctgtacttgtcccagctaccatggaggcggaggcagaggcgagagcgtcacttttgcccaggacaacgggggcaacatattagacaccgtcacttaaaaagaaaataaaaactgtaaggagaagagttgactgatgagatgctaacagtgcaaagctgaggggaggttgctattggcttgagtgtagcccaaggctgtaggaacaaacatcctctggcctggactggctgatgttggatttataggaactgccaaatgtgccagggtgatttatcttactgccaaaatattaacagttctcaactcacatttgagttgcttctgtcctcacagaaaaataacattttatatgctttcgaaaaaaaaaaaaaaa

SEQ ID NO: 559 - DNA, 2559 bp, Mouse
tctcagtgatgatgagaagctccggaggaggcaggagaaagcagggccccgcccctccctgggtctccacccacccacgcccgctaaggtcacctgttctcccatggagatgatgaagaagctcatagctggacaaggcccggaacctcagcccagtaaccgacctacttcccgcctgggaggcagccttctctttggcaatctggtgccagccaacaaggatgcccctgccctagaaccactaggcacaaaactatctgctctgccaccccacggagcaccaggggtcaggaaggtgccaggacagttgcccttgctctgcagcggaaggccacctccagagaagccagcacctatcgagcccccagaagggtggagcccagcaccgaagacccagggcaagctgaacaccaggcctgggaaggtgatcctcttctcagagcctggctgccggggcagaggcagggaggtctggggagacattgcagatgcttcagcgtgggaccctgttgcgtccataagggtgatccgaggctgctggatactatacgaacagccagagttccgggggcagaagctgtcgttgcctgaaggggatgtggaactcagagccctggcgtgtgcgtggagtctccaaggctttggctccctgaggagggctgtgcaggactactgcactcccacgatcagcctgttctctgaggagggcctcaagggcaagccagtgacgctgactggagacttgaaagactctcaaggtctggagagacccctacaggtggcatctgccactgtcactgcaggactgtggctgctctaccccaagccattctttgaagatactccctatatcctagagcccggagaataccctacattggaggcctggggaacatcaggccccagtgtgggttcactaaagccaatgagattgggctgcccaagcgtggagaagccaggggaacccaaggctgtggtgtatgaggcaccaggttttcaggggcagagctgggaagtaagcggagacatctacaaccttcagcagcctgaggacagccagagtccccagctgacctccgtggggtccctgcgaatccttgggggctgctgggtaggctatgagaaggagggcttccggggtcaccagtacctactagaagagggcgaatatgctgactggtcacactggggaggctacgatgagctgctgacctccctgcgggtcatccggacggactttggagacccggccgtggtgctgtttgaggacatggacttccagggacacagagtggaggtgagttctgcactgccggatgtggagctagcccagcacggacccagcacgcaagccatccacgtgctcagcggcgtgtgggtggcctatgagcgggttggcttctccggcgaacagtacatcctggagaagggcgtgtaccgtaactgcgacgactggggctccggcaattgcgcccttggctcccttcagccagttgtgcaggtgggggagagcgatcttcactttgtcacgaagattcagcttttctcaggccccaactttctgggcgaccacatttcctttgaggatgaccaagcctctctgcctgcttccttccatccccagtcatgccgggtccacggtggcagctgggtcttgtttgaggacaagaactttgaggcagaccagcacattgtgtcagagggcgagttccccactctcacggacatgggctgcctggcctccacggtcctgggctctctccggaaggttccgctgcacttttcagagccttccctgtccctctttggcctcgagtgtttcgagggaaaggagatcgagctgactggggaggtgcgaagcctgcaagccgagggcttcaacaaccacgtgctgtctgtgcgcgtcaaaggcggcgtctgggtagtgtgtgagcacagcgacttccggggccgccagtggctagtgggcagctgtgagatcaccaactggctgacctacagcggtacccagagggtgggctccctctaccctatcaaacagcgccgagcctattttcgcctgtggaatgcggcactagggggattcctgtcagtgcctgatcatgtggaggacatgaaagcaggccgcgtggtggtctctgagccccgagctgggggcagctgcatctggtactatgaagatggactgctgaagaaccagatggcccccaccatgagcctacaggtgattggacctcctagcccaggctccaaagtagtactatgggccgagagccgcctaccacgccaaacctggagcatcaatgaattgggtcacatctgcagccaaatgtttgaaggccagatcctggatgtgaagggcggacgagggtatgaccgtgaccatgtggtgctgtgggaaccaaccaaggacagactttcccagatctggactgtccatgtactttgaaccaaccaacgccatcaccagtttccttcaggaggcttttgctgggatgaagtgttttatacagattttgctgtgaaataagctattttctactaaaaaaaaaaaaaaaa

SEQ ID NO: 560 - DNA, 1274 bp, Mouse
ttggcatgttcattgttgtaaacagcatcttgcatgaaaaagttttaccaaaaccttttattgacttttataaattagatagtatttcaaagtttatgtagaatcgtattctttgaaactgtacttagcagagcagaagaggcctgctgacgctagcacgctctgcaatgaatcatgtggcaccgagtctacgccaaggcccccgagaaactttattccatagatgggcagatggttcccaaagttacactacagaactacaaatcgactcttaaaattaaaacgggactttacaagcattctagaagactcaaacttgaagcaatttttggaaaataaatgtacagagaaaagatcttgaagctactgaacagagaaccctcattaacgagcaaatacatcctatggagtcttaccgaggagtacacagacagaccgaccgctaagctttagtgtacacaaatgtacatgacaatgagaggcaaagaaccttggcagacagcgaagctgcagctgggagaactcaacaggaccgctgtatttacatgccggccggcccgagtgaaggagggagacattctctacatccatagcttacagacagttggctctaatcacaaacctgtagcagctgagcacacctactgggcgtggcccgaggaaacagatgttgggctgtctccctaaggttcttaatactttgcaaaaaagtcaaataaaataacacaccttcctaattcctctgagggctacactggctctaagaactccttcagctcctctttgctgcttttcaaaagtcaacacagttgcatttgcttcagaactgtcaatgaggtaatgtgtgtatcaatgaaataaacagaagattcattcattcatggcctttgcacagcttttattattaagctatgagcatcctgtttgaggctagttttactagcggctatgtgcacatttgtccgcaatcaatgaatctacttgtccccctcccttcatagtagcaggctttgcttgtttctctttgcacatccttggctttacagtacatctgaccatagtgcacaacatgattccaagtcaagacagtggcccactgggcactgagcttctgattggtgaagggcagtccaatcagtgctggtgtcatgggattacccaaaccatgtccggccaaaatggcactacccagcagtagtgaaccatctacttaaacaagccctcaggggaaaggctacactggcagtcagtcttgagccacatctttatttggc

SEQ ID NO: 561 - DNA, 3943 bp, Mouse
aacattgggggttccattgtccccttaactaacccaggaccttccacgaagtggaaggctccactcatccacagagggggccactcatttttaaacacacggaccttttgtgacacagtcgtgatcttaactgtggtgtcactgatggagctgaacggtatcccctaatatgtatgtcttgagtgtgaccttgtgtgtctgggagctgaccttgttggagattagggtccgggcagtgtccctagttgaggtagagcctgtgagactgagagtgctctgggtatagctgtgaggacaggagaggcacagagcaacaccctggtcctgagaatacctagaagccagccccactggcacatacggcctcaggagaaaagaggttgttgtattgtttccttcagcactgaggcttaaactataccactgagctatactcccccctccccccagatgtctatttactatttgttttggatagaggtcttactaagttttgtaggccagccttaaacttggcatcctcctgcctccatcttcggagtagcccgtatgacaggcctataccaccaggcccagctacttctgatacctggcccgtgagtttttctgggacagctctgggacatgactgttcatttagccctggttctgttgcctcctgtgcacggtcttttccccctgggtagcgctgtgtctgcctgcttggttatggctcaaagcgggttgggaggaggtggccttgctggagctcagtcagtcaccaggctgtctgacctctgcctcgggatcctggttcactggtttcagagattccccatccccctccccagtctcaaagtctgagtgtgccagggattctctcagactggctgattccaaccatgcccttggtaagcaagcaaaaaagggctgcctggctgagggaagctttgtcggctacaaattactacttgggggccagttggtgagctcacctgtgctgcattttgcttacacgggtctggcccaccctccccagtgaagccttagcactggggggggtggctctgtgtgctcgaagccctgtgcttcctgtccgttctctggggtgttcacagtcatccaaaaccaaggaaatggaggcaggggaggcttagctacgcccaaggtcacagtttacacctgtttgagccgggcttcaaagtggaggcccagagttctgccctcaccggcttatctacatttacgctgactgtaaaaacttcctaattattagacgccagtaaaacagttcacctttggacttgggtagaaagccatgctcacgtgtgtgcttatgtcaacataaggcttttacacacacacacacacacacacacacacacacacacacacacagctgtcttctagaatactggtcatcactgatttgaaaatatttcctgaatgacctcttctgccaggccaataaattgaaccagtagatggctagcttgtttgtaaccctttaggtctctttaagtcctgctaatagctgtgagcctccccagggactggggccagctgccctccactctgtcccgcaaggtacagagaggctctgtggagctagggaggggaaaccagcggagaaagcccactgctgagccatgtgccagtggggggcttccagccaggtgtcttggggacaggggctggcaaccatcctccagacaggatgaaggcatcccacaggggcactgcggatgagtatagggtatgtctgcccgtaccctttctcaccctgcctagccagtctttcaatgattaactgtgagaccttggcaccatgtgtcgcctaccagtgacaagcagaactcacctctcttgcttgcagtaatgattccaaacacactgccctcccctcatcgccccccttccccggccgtaaggcctctctgtctcttctgagcctcctttgctctcttcttagacctttatgtcccaaccatctgagaggttggccctccccgcctcttccatttatttcttgtttcctgccttagcacttatcggaagtgaacaggcctggtgtttttattttgtccctgtctcctcccactaggaaagctggggtttttttgcttgtcatccgtgtcctccccaccccccaccccagatgacacacattaggtgctcattgaatagctgcactgtgaacaactgaatccccagagctctgcgggctgggcttgttgaagtctgcctgctgagtacaggcggccaccgagtgcctgactgttcttactgatgtcaccctacagtttctgtgtggaggctccagagcacacagagtggggcatgtctgtgcaagacagcgaggagggcgctagcctgaaggaggcggagggcagaggtcttcccatccccgtctctgtctgtcactgggagactgggacacggggtgggctggggtgggatcttttcatcttgcctcctgctcccccaccccaactgccgacaaagtaggagaggtaccccgtggctgctagcctccactgtcccctttgtggataagaaggggcgtttctctagtctgcggccacatgtctgagtctggcttcctgcacctgggcacgtcccaggcagtctgtggccaggctgtgtctcctggccaggcctttcaggaatgtacccttgccaggctggctgtgagaataaggctgtgcctgcttggtcattctgacgagtgtgggacggtccttggtgttctcaccagaagtgcagaatctctgcaattctttgttgttgttttttgaattgtatgggtgtctttgttgaaaagcacttggctaggctgtctttttaagtagagaacccgttggtgtgtgcgtacaaacgctacttttattccatttttagacagggtctctcattgaacctagagctcaccagtttggccggctgctcagcaagccccaagactcttatttactacttctgtcaccaggatgcagtcatgtactgccctgcccagcttttttgtggttgctggggatttgaacctgtgtcctcatgctttgttggtagacattttattaactgagccacctgccctgctgatccctttcagctcttcttcctatcaagcaatgtctgtctgtctgtctctctctctctctctttctaagcttcttgatttttgtttaaaaatatttatatgtagagaagttttacattttttcccagttgtcagaggcttgtgtgtcttaattagttaattagtggcttagaaaattgttctaattagaaatggtttgagtatatatgtgtgccgcctgagtgtacgtccacgtaccatgtacattcggtgcttgcagagaccagaagagggcatcagacttctgggaactggagttgaagatggttgtgagctgctgtgtaggtgctgggtccttaacccggaaccttttgcaagagccaatctctctagctccaactcctccaagttttaaggtcaagcaagcattacttgttcttaaaaagggggatttggccgatgttaatctagagctgttttgctgtaaggagcgaggcacccccccagttaacttgagtcactcctattttctgtttctctgcagctttgggccatcgctactctctgtcctctacagttcttccaggactcccggggactgttattgcccagaactcactggccttgctttgacactgtgctattttgcttattccgcattcacagtattttttagttgaattctttcatatgaaacatgaaggaatagaggggtcaagtcacttgcctgaggtcacacagctagatggagtggctctccctgttacctgttgtgcctctccctgttggctgtgtgtcctggccaacctagccagtccctgggttacttcttggtgtttcttattccttatggaatgctatttctattttaaaaaaaaaaaaaaa

SEQ ID NO: 562 - DNA, 1847 bp, Mouse
ctcactaatggttctcaggccagcgacaaaagtgaagagggctctgcagacacagctgaccctcaggagaatcccttgcagccggtatctgtgggtgaagaaccctccataactgagcatcattctgtaggggagcaggcctgggatggcacttctcaaagctgtccgtcattgccagccactgtgagcttccacatggacagcacagatctagagccgggtcagcaaacagctatgaagagctgcagccgggatgacgtagaaatggtggaggaatttgatgaattgcctacagatgctgtccgtcgcataagaagagagcttgtaacagtcacaaagcacagtcctgagcagaggcaggacccgctgtgcatcagcatcactgtgtgcacggtagagaaagaccggccagcggctttagactcccttgaggagcctcttcccgggatgctcttctttctgtcatctggacaggaccagcaagcgcacccccagctgagggaacacccagcaccagaggcctcagaggccagtcagcctcaagatgctgctgagggcagcagtgcaggtgaggagaaagatgcctctgtggagccgctcctcccagcagcctctccgggagggagcacctcgcaggtgcttgaggcagccacgtgcaagaagcaggtgtcacaggactttctggagaccaggtttaagatccagcagcttctggagcctcagcagtacatggcatgcctgccccaccacatcatagtgaaaatcttcaggttactccctaccctgagtttagccattcttaaatgtacctgtcgctacttcaagtccatcattgaatactacaacatcaggccagcagattctcggtgggttcgagacccacgctatagggaagacccttgcaagcagtgcaagaaaaagtatgtgaaaggggatgtgtccctgtgccggtggcaccccaaaccctattgccaggctttgccatatgggcctggctactggatgtgctgcccaccagtctcagaagggcttttctgctgtaagttaggccttcatgacaatcactggttacctgcctgccatagctttaacccgggcaatccataagaagacgagagggagtgagacggaagaggagtactgaagtccgtgggacagggaggcaagaggactgtgaaacacttgggccaacctccagggctgcgagctcgcccggcccttcctgatctctgctcagatctgactgccattgctcaggcattttaaactgtttctcagctgtacaagaatttagttccatggttttgtatggtggtgcctcacattaaacctatccagctgtgaagaactcttgcctgttttcctccatcaaggacattcagaggtcaccgggcagtctccacaaggggatcatgaggtggtccaacactggctctgcacttggagtgagtgaggagggaagcacacggttgagaattatgcctcagaaagaaaactaggcaccttaccctaggcctgtatgctcgttcctgtgagagtggtgactggagaccgacatgccctgtgctgtttacagtgtgtataatggttgtgcttgcacagggctgtgaacgtgcacattaaacccgagcgcctttacctgtagatgagtgctttggcccctctgtaaataacgtgattaaaattcagtattgtatattatgaacagctgactaaacataatcaccacagaataagacaatatcatataatagattaaaatgttgtgcatccttttgtctggttaaaaattttttaaaaaaacttcaataaaaaaataaacgttttaaatgaaaaaaaaaaaaaaa

SEQ ID NO: 563 - DNA, 1972 bp, Mouse
gacgcacttcattcacaccctcacccgcctgcagatggagcagggtgccgagagcttgggggacctggagtcccccgtggaggacactcctgttgaacaagccgcgctttccccctttccgccttccaagccccctgtgagcagtgaactgggggacagcagttgcagcagcgatatgacagactcttccacgaccttgtcctctggcagcagcgagcctccaaaccaccctgcccaccccagcctgccaggtcccagcttccggtctggcgtagatgaagacagcctggaacagatcctgaatttcagtgactctgacctcggaattgaggaggaggaggaggagggagggggtgtgggcaactcggataacctcagctgcttccatctggctgacatctttggtaccggtgaccccggcagcctggccagctggactcacagccagtctggctctagcctcgcatcgggcatcctagatgagaatgccaacctggacgccagttgcttcctgaacagcggacttggagggctgagagaaggtagcctccctggcagttctgggtcccctgagggggacgccgtccagagcagctcctgggacctcagcttatcctcctgtgactcctttgagcttctccaggctctgccagattatagtctgggacctcactatacttcccgaagggtgtcgggcagcccggatagccttgagaccttccacccattgcccagcttctctccaccacgggatgcgagcacttgcttcctggagtctctcgtgggcctgtctgagccggttacagaagtcctggcaccccttctggagagccagtttgaggatgctgccttggcacctttgttggagcctgtgccagtgtaaggattaaggtgccttcttcctgccctgagaccctgttgctgctctttgtgatcttggggttccccgaggtctatgtatgtaacggtctcctacgggctggtcctgctcatggtgccatgtgggcaccctctatttttacattaacactctgaatttatttatttttttatgtttttctgtactgaagaagggagggtggggagggtacccctctttcaatcgcctggtctctttatgtccaaacagaggtcttccacctcctactgtatgcctggaggaggaaggggcggggctctcctggagcctcgcagtccctctttctgtactgtaagatgctccttgctccaaagacagcgacggctgagcgcagggccttaggggcttctgtgaaccataggagctaggtcttctggactgtgaagatgtaatttatatctgtaatttatttggggatggagacggcagtggtggagcctctctggcgggtgggcaggcagtgttggggccgaggcttcggtgtaccctgccagtctgggcttcggtgtggtgtgtgggttcgagtttatggctgctctattaaacagcggcctggctcaactgagcagacagaggctgtgcttgaccagcggtgaccaaaaccccttctgcccccttcccagaaactctacttgccctctttccaattccctctccccaaggccatggattataaagcccctctgtaagatggtgagccaggggccctaagagggcatgaagcacaccctgatcactgtctcaggcctttctgggcactgactcgaccctggcccacctcacgcccccaggccagttggcaactggtggctcttgagggctcttacgcccttcattagctgatgttggattttatatgcatttttttattgtctctaagtgtcagaactataatttattcatttctttgtgtgtgtgtgtgtgccaagaaacgcaggctctgggcctgcctccttgcccagaaggccttgccagcctgtgtgcttgtgggaacacactgtacctgagctgacaggtaccaataaagatgctctatttttaaaaaaaaaaaaa

SEQ ID NO: 564 - DNA, 3527 bp, Mouse
gctggagcttggcttaggcgggtaggagacgctgtcgctacgcggacaccgcgggtggagcggaggatctgcgagccttgccctgccctgcccatgtcgccagccggccgctgagatctacacgctctgcccgctcacgcgtgcggctgcggacgtccccggagagaccctccatcgcgcagcgacaatggaggtgaattgtttaacactaaaagacttgatcagccccaggcagaccagactagattttgccattgaagatgcagagaacgcacaaaaggaaaatatatttgtcgaccgatcaaggatgaccccaaagacaccgatgaagaacgagccgatcgacctgtcaaagcaaagaatcttcaccccagacagaaaccccattactccagtaaagccggtcgacaggcagccgcaggtggagccctggacacccacagccaacctgaagatgctcatcagcgccgccagcccagacataagagaccgggagaagaaaaaggagctgttcagacccattgagaataaggaggatgcgttcgtgaactccctgcagcttgacgtggccggtgacggcgctgtggatgagtatgagaagcaaaggccaagcaggaaacagaagagcttggggctgctgtgccagaagtttctagctcgctatccgagctaccccttgtcaacggagaaaaccaccatctccctagatgaggtcgccgtcagtctcggcgtggaaaggagacgcatctatgacatcgtaaacgtgctggagtcgctgcatctggtcagccgggtggctaagaatcagtatggttggcacggtcggcacagcctccccaaaaccctgaggaccctacagagactgggagaggaacagaaatacgaggagcagatggcctgcctccagcagaaggagctggacctgatggggtataggttcggagaacgcaggaaagacgggtctccggacccccgagatccacacctacttgatttttccgaagccgactacccctcttcatctgcaaacagtcgaaaagataaatctttaagaattatgagccagaagtttgtcatgctgttcctcgtctccaaaaccaagattgtcaccctggatgtagctgccaaaatcctcatagaagaaagccaagataccccggaccacagcaaattcaaaacaaaggtacggaggctctatgacatagccaatgttctgaccagcctggctctgataaagaaagttcacgtaacagaagagcgaggccggaaaccagccttcaagtggatcgggcctgtggacttcagctccattgatgaagaactgttggacgtctctgcatccatcttaccagaattgaagaaggaagcatacggccagatccgagtgtgtgcaaaagagaggctggtgcggtacggttcctttaacacggttcacacgtctgagaagatacagagaaaagtgagctcagaacccagcagcccacagggagaaagacaagggtcagcctattccctggaaattggaagtctggcggccatctacagacagaaagtagaagataattcgcaggaggaagcctttgtcagtaacacagcagtgcctccagcaagcatcttggaccccgccctctccatggactctgaatactgtgtcaagcctttagcccagccagtattttctgttgctcaaacagatttgccggccttctctgcgcagaatggtccaagcggacaagtaggtgtccccgttccttctgcagcctccgacacagagaacttaaagccagctctgctcgccggccagcccctggtctacgtgccctccacccaactcttcatgctgtacgggagtgtgcaggagggactgtccccagagtcaaggtcagaggaagatggtggtggctccgatgtcccagctgacctgtcagtgacaccctctgctcagaagcgcctgtgtgaggagagagatcctcaggaggaggaggacgagcccgccatgaaaagacaaagtcaggaatttgaagacagccccttatccctagttatgcccaagaaaccctcaagttccacagaccttgcctgtcctgtgaccatgggaaacgggagctctccacccctggaagacgcctgtgttaagggtcagctccctgctgcagaagaagttacaggaaaggctgccccaaactgctatgttgcttctgagtgtggaaacccggcaagaaatccagacacagaaaagccttccaacgaaaacgagatcaccaaagacccctcgctgatgcagtacctgtatgtgcagtctcccgcagggttaaatggttttaacatggttttaccaggcacccagaccccccacaccgtggcaccctccccggctcagctgccatcctttggcgtaccctgcatgttcctgcaatccccaggcctgggcccttttccagttctctattctcccgcaatacccgggcccatttcttcagcccccggcactcacccaaaccccggacccatgaacttcggcttgtccaccctggcatctgcttctcaccttctcatcagcccggcagccatggtcaatccaaagccatccaccctcccctgtacagaccctcagcttcgctgtcagccctcactcaacctgaaccccgtgatgccaggctcacacggcgtcatccaccccgagtccccctgttacgtgagacatccggtatcgatggtaaaggcagagcagtcccctgcaccggcgactcccaagagcatccaacggagacatcgggagacgttcttcaagactcccggcagcctcggcgatccggtctttagaagaaaagaaaggaaccaatcaagaaacactagctcagcccagaggagactagaaatctctagcagcgggcctgactagcctgatgcttcggtgggtgggatggcctcagtgcctgacgctccctgtgtcccagacaaatgtcctaagtggaacacaggtcaccccaggtcctcagctgtgtccttgctctcttgctcgatccactggttctgctaacttcccgatatcatgagtcatctatcttcctggaagtcattaatactaattatgcatttaacaccacctagcatccaggctgtgcccgtggcggtgttgctgcggcaatgccgtgtgactgctatggtttttctgaagcggggttgcctagcacttaaccagggtaagtgtcggcgatatgcctctccacctgccctgagcaagtctgtagtgagaactgtatctgcagcctaaaaacgctactgcttcctaaggctccgggaggccaccttcagtgaggaatcctatggtattatttatttttgtccctgaagcgggactttactgcacaaagtttacaacatcatccaatgtatttttcagggtattgcgacttgaatgtttatgcttttgttgttgttgttattatgacttgccctgcgcgcttattatacggcttattaataatgtggataaatgtatatccccgaaaaaaaaaaaaaaaaaa

SEQ ID NO: 565 - DNA, 1258 bp, Mouse
ggaaaaggaggaagaggaaaagatcggaaggactcagccaggaagccaccccgtcgcaggacctaattcagcacagctgctcccctgtagaccacagtgagcctgaggccaggacagagttgcagaagaagaagaagaagaaaagaaggaaaagaaagcccgagccacagcaggatgaagagagcaagcacccaggagaccagaggagcccaaggcccagtgtcaccccagtccctgcgttgagtgtgaatggccatcttcctagtgactgcttggttttgacctgggatggcgagccttcagccatcagtcaggacgccatcaaagacagcagactagcccggacccagaccgtggttgacgactgggatgaagagtttgatcgagggaaggaaaagaaaattaaaaagttcaagagagaaaagaagagaaacttcaatgccttccagaagcttcagagtaggcgcaacttttggtctgtgacgcatcctgctaaggtggccagcctcagctatcgccgctgagcttgctgtggccattagaggaagagcagtgtgcctgtgccacagcatccagagctgtcacatcacatccttggagctgtctgcttggatctgaggatcgcatcgtgcatggtcatggtggaggctcctggtcccactgttcacagatgatccggtgcaagtgctcagctcagggcctctggtggtttcacgttgaacctcacaagagaaaacctggcctgtggtgtcatgctgacagtaaccttggagacctctggaaaggttgagcatcttcctcatagacctgtggtccagtaggaacaccgttcctggcctggggctgtcagataaggaacagaggccagggtggcatttggtggtgccttttctggtgagcatgtcctttgctctctgaagctggagctgtctcgtggctctcctctcagaggggcctctgtatgactgactatcagctgcagcaagaacaagccctgctgactgcactgcccccatccccacccccaaagtgcatctccttgaaagaccaccacttcttccagaaagctgcagctgctgggcagggagagcctctgcttccgtggctgccagccctgcggggagactggcaagctcccgcatctgccacaacctgtggatctctgtcaaggtggtggtctttagagacgaattctccgttattgtactacttacgataaagcctttatttttaaccaggaaaaaaaaaaaaaaaaaaa

SEQ ID NO: 566 - DNA, 546 bp, Mouse
ccttggtgcaccagctccagcctcaggacttcctcctcctggccctgacagcccagctcttgtcccagcagaatccagtgacaggaaggagtttctgaggcaggggaggaggcttctccatgggaaccagacagccttgcttcactgtataagtgccctgatcacacgcagaatgaagtgccaggttgctcagaagcacaaagggtgtggctactggccctaaccatggactacgtggttctaaccaaagactctagaactctggggtgggggagaaacaatgtgttctgtgctccagaacctcggcttcctggcccatatggatgggcttggcaaggaacctacctcttctctaaggtgaagccctaaggtctgccaaggctgacacgtcttccttttctactgacagactttatatatatatttatatacgtggtagttacctggggtggtggtgtcagggaattgaggcaaaatgactttactgtacctccggcctacagtggcaccccaataaacaggacaaaatcaaaaaaaaaaaaaaaa

SEQ ID NO: 567 - DNA, 4109 bp, Mouse
gtgcgagcccatcctgtgcacagagggggcttcaccaggcttccgtgtagcgaacatcaacctcctttaggttaggaagcttggccttcagatcctcgtaggtgtcagccgagagcttggtgctgttcatatttaaactgcaaagactcttcatggagctgagggccagcaagcccgcgtcggtgactggggtctcacacaggttcagcacttggagcatagtgaggtgctccgaaaggagccgcaggccggcgtctccaaactgcgtggaccacagattgagctgcttgagggaaggcagtttgatgaggtgctcggcgcaggcactggtgacgttggtgaaggccaagctgaggttctccaggtttccaaaggagccagagctcagcaggcgggccaggtccgcatccgtggacttggagggcagtgttagcctggtgggtccgcctttcctttgcagctccttcagctcccgctgccggtcgcacagctgttcatacatgcgcttgcccacgtccgtgctctccagcgtggagatgatctgcagttgggtgtcgttgttgtcgatgatgttgtattccagcatcaaacacaggatctctgccatggtctggttccctctcagggccaggagcatacaggggcccagcttgttttctgccagtgagagcagaaactttttggtcttgtaacaggagcccatgagaatgtgcaccatgctggcaaacagctccccgtcatcatcacaggccacccctccagggctgtagagctggaaccagccatccttgcctgcccgcacgctcagcagacaggagtggacttcctgtcttggatcttctgcaaacctctgaatcacgtacttcagttcctttgtgaacttctcgtgggcgagagctctgtaccaaaaacaaagagacaggcagttagaggcctttgctgcccaacgatcccatttcctcccaggacatctagactttagctctgactcgaagagaagagtgtagagaaaaatgacaaagaaacgagggtatccgatgtgcccctcctttgacaaggtgaggatcacagtcacacgaacaggctgagccaccgatgtccccaaagtcaaccccaggcccacacctgtcatgcagaagtgcatgaacgtgttcaggcacacatgggctccagggacccaggtgtgtttgttaattgttccacaattaaggcgagcctgcagtaattaccagcgcacattgccaggcaatcagggaccattcttccaagtgaattgcatcatgggccactgtcaagcgggtcccagggcctgtggggacagctgctgtaaccaatgatgccacagacagagaaggctctgaggagtcagatttctccggtctccattcttgggagccccgagggaactagccggccagcaaatggggcaattactgggtgtaatgtccccctcggaggagctgcattcataaacacaggctcactaatgggctctgcagagagccccaagtgcctcccaaggcccagcagcttccaatctgtcaaaacagacctgcaggcatgtgaggcccgtggctgagctgaggctctctgtaggttgtgatccaacgcacagtgatgcttcccatgaattcttccatgccagtatgagggtgggcgaaagggtcctttctggccacgctcagagtgttgttagctaacggccatcaaggctcagtacacacagctagccttcccttgcacagccctgaaacggctccatatgccttttcttttcttttcgcttgttggtccttcttggtgcttggagatcaactcagggcgttgcacatgctaggtacacgctctgccaccagagtaccacactggcctttcctccttctttcctgccttccttcctttcttccttctgcagacagggttttattatgtagctcagggtagccccaaactggaattataagcagtagttctcaacctgtgtgttgagatccctgggggggtaggagtgggggtggagtcaaaagaccctttcataggggttgcatatcagatattgatgcaatgcttcatagcagtaacaaaactacaattatgaagtagcaacaaaaagtaactgtatggtggggagtcaccacaacatgaagggctgtattaaagggctgcaacattaggagggctgagagccagtgaattatacaggtacgtgcgccatgcctagcacagtggtgatattaactgtcaatttttactgttccccagggaatgggggggagggagagtattactgtctccatgtgctatgtaatcaaaaccgttaaagtaactacaggccaggcatcgtagagatggctctggccttgtctgagtttaatgagtccctgtgtcactgtcacgagacctgaggctgttcctatcacagtcttggtttttcagagaggccctgagctgggccacatctctgtcttggctgtgggtcctgatatcctactcagactcacctctccacgacactgtgagccccttaaaatggcatcaccctctcttgtggttcccttcccatttggcaggttctggtgggacttactctttggggaatggaatgggttgaagcaagctggccagagacggtctccagtcatcgtagtcggacagcagcttgaggatctccacgtggcaaccgagcgtgcggccggcctgggggcccagctcgatgctcatggtcccacaggctgggctgaccatcagacagtcaataaggttgggctcgctgtcgttgcccgtgctggcggtcagcgccggcttggcagtgctggtgcgctccacctccacgtggacctcgctggaggccacaaccaccgacttcagccgtggctcagacaatgtggcttcctgagacaccaggtccgggctggggtgcagcagacgcagaggtaaggtgggctttcggtcgcatggctgctggcagccgtttcggatctctttcaggctgggggagttgtcgcgactgttgatgaactcttcatagcaggagtatatggcagccaggcacacagccacgagattgggcaggacccggggatgtgggcagtgccctgtggggccatgcatgctttgtatgaacttctttaccacctccatgcctgcgttgagctcgttcagggcaagaatatactcctgggtgaagagcctcagccttgggcacttcccaaagtccatattatgtttaaggatcctctgaaccactggtgtgaacacctcgatgaccaccatagaccggggccgctctctgcagtgcttgcagaagaattcgcagaggtctgggggtgggtggttgttttctagcagaggcgcaattgccacaatgatgttctcgtgctcctgagtggtcaggtttgtgttctctgagagcagttttgagacgatttccagcggagcctggttgatagaatcatcctgcagaggcgacgtgagggccatgtccaccagcgtccgtatctccttcaagacaacctcccagcggcttgggttactcaggactttcttgtatttgtaaatctttttcttccactgcagagaatggaaccactgatctcgcaggtagctgttggcagcctgcagcaggacggtccctccggggatcgtgagctgtaaacagtacttcggggcgttctcccaggacagcggctgaacgtcttcaatggcgctgtaggagaccgagttttccatgtacccagacggcgtggcggatgctaagctgttgtcggccagcgttaggtggtgcggctcccagcgcctcaggaatttggaggtgaggatcttgctgagaaaggtccgagggtgccggatgacacagacctgaatgtcgccctcctgcagcagcttgtacctcatcccgttgcaaagcagcagggcccggcggcaaggcacggcgcccatcaccttggtgccctcggggccagacacgtcgctcccaagcagcggcttggtctcctcgatctgccgggggtcgccgccgcccgagctgctcgtcacatccatggccgcgccggggcgggggccgcgcgcgcgatcgcggctggcgtggggccgggccggcggggcccccg

SEQ ID NO: 568 - DNA, 2167 bp, Mouse
aaactcacctgtacatgataccgtaattgcctttctggcaggccttccaccaacccagaaagtttgacaaagggggttaactgtaggacatttcgtccttccccggcagtggatgtactgttttgagccctgtgtggaacttctgaacttcgtgctgtaactttcagaactcttagacatgggtgtgctcactgaactctagggtctgtgtgctagatgctgccaacgctgtattcaggacctgaagtgagtacccgtgtggatccagaccaatccagtgtgagactactgaagaacatctgttgccagaacggccacaccaaacagatggagtgccccagcacttagcttcttaaataacatcggaaccattcagccagcgagtctgtgtttgctttttgttcaaattgttcgccgaatctaaattcctccaaaggacttgtgactactcttagctcattgctaaagtgcttgcttaccgtgcctcggcccgccttggttggttgtaaaaatcgtaggagggggaaaacaattattttatatatatgttcaacagagattgaatatattatcaaatctttttttttttaattgtgctttaaaataatttatatggagagcaacaacagcaaacaggtgctaatttgtttggatattagttatataagcagttctctatcttaagactgggtctcaagtaacccaggctggccttgaactccttaggtaacttgggatagttttgaacttccgattcccctgcctccccaccccagggctgtgattgcaggtgtgcgcttgggactgaccccaggctttgtcggtgctagggcagcactctgcgactgaattaggtcccagccacttctctgtcttttaaaagaacaaaacattgctaaatgtgccattgttgctttgagttttaattcttttttttttctttctttcataaaacattacagtcttaagatattaaagacttttattctggttctatttctgtcttttcactcaaaactggttttacaaatgatgccttgtttacagaaagctctctaccacagggcctagtcatgtgtaaagtctcagtttctctctggagtatcttggagcctagcacactggcttcttcaagagaaataagaaagatcattacgatgccacctatcacaaggctgagatccatactcagccgtctgataaagagaggcttacttccgatgcatagtattgatctacttccataattgtgtggattctttaagcgctctaggtacgatgacagcattccccgataccatgcggtgcggatccggaaagaagagcgagagatcaaagatgagaaacacatggataacctcgaaaaaaaacagtggatcaccaagtggaatgaaaacgaaagttactcatagagaggagggcacaggaaagaacacctcacactacccaaagcccccccttattttttccagctcagaaattcaggtggcttcaaagcctgctcagctcccccatatatgatttcagactgacgacacccagtatggacctacagtttcaactgtggatattgttacacctaaggctcctgttttgcacagccaaatttaagactggtagagtggatttttctttaactgccttaatttaactttccggattgcctttgtttttgacgtggctgacttccacacgctggggcagggcctgcccatctgcactgctgggatgctctcccccaggtcacctgtgctaacagagtggctatcccagctcccacaagcattcttctcataagattgaccttggctcaagactgccaatggatagctgtgcctctggtgaaagttctgtcttaaatgtgcaatagaaggtgatgttaccctttggccttctttctccatctcctagaagtgaggacccttgctgacgccaaatgcacacaggttcccgtctcccttgtcactaaagcacagggtcgacagacttgaatgctagttacatttgtttgtatatgatatttatttttttcttcaagccatcttgctgttgactaataggccaaagatgcttctgggtgtgtttaagcaatgagaatgagaccctgggaggtcttgttgttgttgttgttctcaccttacttatttcctgcaaaaaaaaaaaaaaa

SEQ ID NO: 569 - DNA, 1596 bp, Mouse
tttgcccgcaccctcccctgggcttcagtgctgcgtgtctgggacatgtttttctgtgaaggcgttaagatcatcttccgagtggctctggttttactgcggcacacactgggttctgtggaaaagctgcgctcatgtcaaggcatgtatgaaaccatggagcagcttcgaaacctaccacaacagtgtatgcaggaggacttcctggtgcatgaggtaaccaacctcccagtgacagaagcatggattgagcgggagaatgcagcccaactgaagaagtggcgagaaactagaggagagctgcagtatcggccctcacggcgactacacggctcccgagccatccatgaggaacgcaggcggcagcagccacccctgggcccttcctctagcctcctcagcctccctagtctcaagagcagaggctcccgggcagttggaggggctccttccccaccacctcctgtccgcagggctagtgctgggcccgtccctggggctgtcgtcattgctgagggactgcatccatcccttccttcacctactggtaacagcaccccactaggcaccagcaaggagatcaggcggcaggagaaagagcggcagaaacaggagaaagatcgagagaaggagcggcagagacaagagaaggagcgggaaaggcaggagaggagcggcagaagtgggaaaaggagcaagagaaggaacagcagaagcaggagaaggagcggcagaagctggagaagaaaggccaaggccggaaactgtccttgcgtcgaagggcagatgggcccccggcatcccatgatggtggggacaggtcagcagctgaggcccggcaggatgcttacttttgacctctggttggatctggatggcatggccctcctccttcccctcatcgagagcagccctggcaggctctcccagctccccttggcaggctcttcctttttctgaggaaagtggcttgattcccctgactccttgccagctgctgatccgtacatggccaggacagccacagtgcaagggacagctgcattacctagggtaacagtgaccaagtctggagacccttttgtccagttaggctcagcttgggtctctgtcacacctatgaaatccttctggggtgctgtcttacactccggtggcttcccttagatggtggagctaggttccttttcctgtcttggggccctgcctgtcaccccactgcctactgggggccaaggctgttttctctcctggatatccttgtgttgtaattatgtacagaaggtcaggttggcctggggtgggtgctgtcctttcccctctccacagcgctgcttcactccagtttatttaagaggatatgctaggaagtgtcctccgtctccttcccacccgtgccctgctctctcctaactcacttgctttgtatgctcaggcctctctgctgcagtcacaaagtctgtcttcgattttgttcctttctacccatcaagcccctctctgaataagggtcttcccttgagtccaggggtggaacccaatgtttacattctcttcgggcggggtcccacctcagtggcagttttgggcgcttga

SEQ ID NO: 570 - DNA, 926 bp, Mouse
gaaggcttccttggaattggcagggatgggcgaggctgaccaggaagtgtccatctctagcttcctgtatcatggcttctccataaaattcctcaaaatctgttcccccagcagatttcctgtgccatcttgggctcccttcctattctttcccgtctttagggcctcctcacagtgttgttttctaacaacgcaggcatgagaaggcactcactgtgtgctccctcaggcctggcctctcctggtgattgtcttcttcctctgtgtcctcttcatcccaatccagaggctgcagctggtgggcctttctcttctcactgatcgttcttgccaagatcagcaatgaccttggctctgtgtccaggggagctttcttgtctcactgtgctgagcgagccttgtgtctgttccccatgccacgccctctcccttttaactgagggcaggctggcttgctttctttctttctttctttctttctttctttctttctttctttctctcctcctgctcctcctcctccttcttcttcttcttctttctttttcagattctggattttgaattgtgtgtaaaaaatgtttcttttctgagaacatgaactccagagttctctggacactaagggagtgctgagtttagagctcctctctgtagctttcttagagcccttcacacccctctctcttcctcaactgttgcaaaccttacaggaaagagctgtgtccttaataagattcatagttgggctggagagatggttcagaggttaagagcactgcctgctcttccataggtcctgggttcaattcctagcaaccacatggtggctcacaaccacctgtaatgggatccgaagccctcttctggtgtgtgtctgaagacaactacagtgtactcatataaataaaaaaaaaaaaaaaaaa

SEQ ID NO: 571 - DNA, 1589 bp, Mouse
gtaagatggaagatgaggaggtcgctgagagctgggaggaggcggcagacagcgggcaggaaatccaaatctcctcccaaagtgcccattgtgattcaagacgatagccttcccacggggccccctccacagatccgcatcctcaagaggcccaccagcaacggtgtggtcagcagccccaactccaccagcaggccagcccttcctgtcaagtccctagcacagcgggaggcagagtatgcagaggctcggagacggatcctaggcagtgccagccctgaagaggagcaggagaaacccatcctggacaggccaaccaggatctcccaacccgaagacagcaggcagcccagcaatgtgatcagacagccgttgggtcctgacgggtcacaaggcttcaaacagcgcagataaatgcaggcaagaaaggacgccgctgctgccaccaccgcctcctggatggtctgccatgggtcgcactgctgtggcagacggctggacttgagcagagggaataacctgacttacttgcactgtgatcccccttgctccgcccactgtgaccttgaaccccatgcactgtgacctctgcctcccccccttcccactgtgattggcatgttgacaagggctgtcccaagtcaatagaaagggaaagggtggggactaggggaggattaggggagcctaccaaggactcagagtagaaggtcagacagtgccacttggccacttggggtaaagccagtgccagcaataacagtttatcatgctcattaatttgggatttcaaaccacaaatgagaacttccccacccaccccaagtgcatgtcgccatcacttaaaagttccattgaaaataaaaaaaaaaaagagggcgggatggctgacctacagagtgagtttggactagcacagcctagagcaagaccttacttccaaacaaacaaagactcgcctagaccagtggttctcaacctccccaattcgagccttaaaatagttcaagctgtggtgactccaaccataaaattattttcactgctgcttcagaattgtaattttgctagtgttatgaatggttatataaatatcttaggggactccagtaaaagggttgttcaaaaacaacacccccccacacactaccccccctgcagaggggcagtgatccacagattgaaatctgctgacctagaaaggaaactaattcaagctgggtcaactagtttccccagctgtagccagcctctgctgttgccttcaatgaattcctagaccatgccactcatctgaatcagggccctcagtctacagatgagtctgtgatgaaatatcaagtggactcatctggcatgagataactcaaaactatgtccagttctgaagtatacccacaggcttactcaaaacgccggtatttcacgcctgtgtacagttctgcacgagactgaaatgaacaactgtttcatgttaacagccagacttaacttagagtgcagccaagccacagtagaattgctctgtttttaagagaggttatttcaaattaatctaaggtatcatggtgaaaaaaaaaaaaaaaaaa

SEQ ID NO: 572 - DNA, 2920 bp, Mouse
aaataaagcaaaaccaatgacaacaacaacaaaaacaaacaaaacaaaaacagaaaacagccactatttatgacttgggttaagggagtttgctgtgcaatcatgaagaccagagttcagatcccagcacccatatagcaagagagcatacaagaagcacctgtgactgcactctgaagaatccaacaccttcttctggcctccatggcacacagaaccccccaacacatgctcatccactctcaaagagacatacataaaaataaatatttaggtcctgggtccctcagagactagtcttcacaggtcctaaatacaaacgagcggaccgcaaagggtgagggagtggactgaagaagctacacagcttctgggacagggagaagcaacacggcttctgggacagacccagtttcaggctccagacatccgggcaccttccactccagaggagaggtgtctgcccgggagggctcggaccaccagagcaggtgagacagccagcttgtgtcccatgtccctcagagaccagtctgtgcaggtgagcgtgcagactgcagaggcaacacatcttctgggaaaggccctgtttcaggacttcatcttcagccaggaggcgggtctgaacgccagatatctgtgcaccttccctgcaagaggagagcttgcctgcagagagtactctaaccaatgaaactcaggggagagctagactcccaagtctgttgacagaggctaacagaatcacaggaggaacaagttccaaccagagacaactataacaactgactccagagattaccagatggcgaaaggcaaacgtaagaatcttactaacagaaaccaagaccactcactatcatcagaacccagcactcccacctcagccagtcctggataccctgacacacccgaaaagcaagactcgaatttaaaatcatatctcatgatgctggtagaggacatcaagaagggctttaataactcacttaaagaagtaaaggagaacactgctaaagaggtagaagttcttaaagaaatacaggaaaacacaaccaaacaggtgatggaattgaacaaaatcatccaagacctaaaaagggaagtagaaacaaagaaaacccaaaatgagacaacgctagagatagaaaccctagtaaagaaatctggaaccatagatgtgagcatcagcaacagaatacaagagatggaagagagaatctcaggtgcagaagattccatagagaacatcggcacaacaaccaaagaaaatgcaaaacgcaaaaagatcctaactcaaaacatccaaaaaattcaggacaaaatgagaagaccaaacctgtggataataggagtagatgagaatgaagattctcaacttaaagggccagcaaatatcttcaacaaatttatagaagaaaacttcccaaacctaaagaaagagatgtccatgaacagacaagaagcctacagaactccaaatagactggaccagaagagaaattcctccctacacataataatcagaacaacaaatgcactaaataaagacagaatattaaaagcagtaagggaaaaaagtcaagtaacatataaaggcagacctatcagaattacaccagacttttcaccagagactatgaaagccagaagatcctggacagatgttatgcagaccctaagagaacacaaatgccagcccaggctactatacccagcaaaactctcaattaccatagatggagaaaccaaagtattccatgataaaactaaattcacacaatatctttccatgaatccaggccttcaaaggataataaagggaaaacaccaacacaaggatggaaactacaccctagaaaaagcaagaaagagatccttcaacaaacctaaaagaagacagccgaaataacagaaccccactttagcaaccaaaagaaaaagaaaaaaaaaacaggacgcaacaattacttttctttaatttctcttaacatcaatggactcaattccccaataaaaagacatagaccgccacgccctccggtcgggtctgcttgacaggctgaaagtctgtaagcactcaacgagggaaagagtttcaaggaagttcacctcctggagttttggcattctcatttaaccatatactcatactctattcctgcgttagtctggtatatggatctatgagctctcttttaatattttattataaacgccttttaagattaaattctgttatagtgttccaaggtcccagtagcctgcaaacttgaaatctgagcttgaaatccagcaggactgcagaaaggaagttacctattcagttactaattaagcattataaagacagtagctcagagctggtctacaaaatatttaccaaggacagtagcaattctcacccaaactagggaacaatagagctagggaatctcactgagacagagatcttctctatagataggtatagagcttcactttagaagcaagttggtatattcttctgtagacccaggaaatagggtgttagggtattgcagtattcatgataaggtctgctagtgcagaacccctggtggtgggtttaacaatagactagtttacacctggcccccttcttttgcggcagcagcctggtccccacctttttttgatgtattcattccttttgtattgcatcactgtaacttggtggattgtatttggcctggtttcttgttatttctttggtataaaaagtttgatgctggacttgacacaatacattcagattctacacaatctcttctgttggtctgtctgtcatttcctctgacgctttgcccacctgctccagagacctgttccacgcacacaaagggagccagagggtctgcagcaatagactaatagactggctacacacacaggacccaac

SEQ ID NO: 573 - DNA, 1859 bp, Mouse
gctcaaagtggccaactacagcaactcaggcagattcaagaagaggttcatgtatcctgtaggatatgggcttcctgcttttattgttgctgcatctgcaatagctggccacaaagaattatggaacacacaaccactgctggctcagccttcatcgaggattcatctggagcttcttggggccagcggcagccattatcttgataaacctggtgttctactttctaataatatggattttgagaagcaaactttcttctctcaataaagaagtttctacacttcaagacacaaaggttatgacatttaaagccattgtccagttatttgtgttgggatgttcttggggcattggcttgtttattttcattgaagttgggaagacagtgagactgatcgttgcctatctgttcaccatcatcaatgtcctgcagggtgttttgatatttatggtacattgtctgcttaatcgccaggtgcggatggaatataagaagtggtttcatagactgcggaaggaagttgaaagtgaaagcactgaagtgtctcattctactactcacacaaaaatgggtctttctctgaacctggaaaatttctgcccaacaggaaacctccatgatccttctgactccatccttccaagtactgaagtagcaggtgtatatctaagcacacccaggtctcacatgggtgctgaggatgtgaactcaggtactcacgcttactggagcagaactattagtgattgaatcagctccttcccccaagcctcttacagtacattttaacttgtactgtgccatgcacatgaagctataattgctagtctggtaaaacaactgttgcatattccatgatcatttcattttatctctacttgcaaaagttagctttctttttatatcatttttatttctctttcttttgtttatatatagcttcagttgagtgggtttctagtcttaatgttctagatcactattttcttttcagttaacctttattggtatttagttcctgtgtagtgtataccactggaatatttttatttctttaattttgaggttaaaatatagttacatcatttttcctttttttctttcccacaatcctcctgtatactttttccctggtgtctattttattgtttctacatgcatatatattttatgcaaaacatatatatgtataaatataaatatatattcttatatgcatgaaaaccatctacttcatccaaataatgttccttctatgtatgttttcaggacagggacaacaatagctatggtagcatggcaggggaaagcccacaggacctcagccttatacaaagaatcagaggcaactgaggagtgctgagttgaaggaattgtcttacccaggggagggcacattaattggttatctaatacaaaatgttcagccccaaaactgttaagataaaagcctatatgcatcttaggaagtatctaccttgatacacctttattggaatatcatccacatgtttattgtgtgttctgaagagggtctgttgaatttctaagggttgatcagtttaattgtgccattttatattcagggtgtttggctttgttgtagtgaataatgctatatttccctgtatgtgtcatctttgactgttattttttcctggcaatactttattcaacaagaacctagagccttggtttattactttttcttccatagaaaaactatttgtcttccaggattagatatgatcaatatttcttatatgcatgtatcaaatatcatgatgaaatatattactgtgtataattaataactggcaataaagtccaagggaaaaggaaaaaaaaaaaaaaaaa

SEQ ID NO: 574 - DNA, 2305 bp, Mouse
gaatctgtggaagcagtttattccagtatcacccaggagcagccacacagaggctggtaggagggctggatttttgttctctttttttcttttctttaaatgtaacacttctttattttttcttcttgaagagtcttgaggatacttacattgcagttaagtagtacagggtggataaattctactttgaagaaaacttctctcctctgacaaggttggacttgtacacaggccagcatgaaggagtatgtgatgctactgcttttggctgtgtgctctgccaaacccttctttagcccttcccacacagcactgaagaatatgatgttgaaggatatggaagacacagatgatgacgataacgatgatgacgacaactctctttttccaacgaaagagccagtgaacccttttttccctttcgatttgtttccaacatgtccatttgggtgccaatgttactctcgagttgttcactgctctgatctaggtctgacatcggttccaaacaacattccatttgatactcgaatggttgaccttcaaaataataaaatcaaggaaattaaagaaaatgactttaaaggactcacttcactttatgctctgattctgaacaacaacaagctaacaaagattcacccaaaaacctttctaaccacaaagaaattgagaaggctatatttatcccacaaccaactaagtgaaattccacttaatcttcccaaatcattagcagaactcagaattcatgataataaagttaagaagatacaaaaggacacgttcaagggaatgaatgctttacatgttttggaaatgagtgcaaaccctcttgagaacaacgggatagaaccaggggcatttgaaggggtgacagtattccatatcaggatcgctgaagcaaaactaacctcaattccaaaaggcctaccaccaactttgctggagcttcatttagattttaataaaatttcaacggtggaacttgaagatcttaaacggtacagggaactgcaaaggctgggtcttggaaacaacagaatcacagatattgaaaatggaacttttgctaatataccacgtgtgagagagatacacttggaacacaataaactaaaaaaaatcccttcaggattacaggagttgaaatacctccagataatcttccttcattataattcaattgcaaaagtgggagtgaatgacttctgtccaacagtgccaaagatgaagaaatctttatacagtgcaataagtttattcaacaacccaatgaagtactgggaaatacaacctgcaacatttcgttgtgttcttggcagaatgagtgttcagcttgggaatgttggaaaataattcatgacatccattaaatataaaattcaaaaatgtatacatttggaatacttgaactgtcctagtaatggtagtattatacacataagcaaaattctattctatatggtcaatgacaaaaaatttcaacagaattttgcctaattattgatgctcagaataaatttctattgcagtgtccttctgcacatgaatgattcttgcgtaaatcttttgcttgaacattctttttttcggcaaaaaaagatatttagtatttaacccttcattatcaagtcagtcaaacagaattgtactgtaaacagaatgcttgacttagtaacatttgtgtcatatctttgctgttagaaaaacaaaactggcaagaacagcattttgaagagtacatatatttttagtagttttttaaaaaaaacttggacagtactgtaatgtttccaataatgttggaatacatatagtttgacagaatcaaaattctcaactcataataaagcttcaagtattcacagataatattcatcagagttggtttgggctataacacatgaatatcttttttaaattattaactggctataaaattgtaaaaatataatgactgctaatataaaatctataatgtgcattttatgatcagttatataagctttgaagaacacagtaactgttaggttacatagtgttattacttcaactaggaatatttcaggatatccctttggaacagtatggacgccaatcaattttatatcaacttatctcttcaaatatgcacattgggtaatgcctggaaacatagctaaggtgacaaaaactgaaaactgaacaaaacttaatagtactttcatgtgttttttttaaactgatattcattatgaattaagtaaaaagtgacaataaggaaaacattaaatactggttttcaataaaaaaaaaaaaaaaa

SEQ ID NO: 575 - DNA, 1930 bp, Mouse
gcggaggcgcgcagggcagcctgggtccagcccacacccctcaccaggaggcaccatgtggggatgttggctggggctgctcttgctgctgctggctggccaggctgccctggaggcccggcggagtcgttggcgcagggagctggcgccagggctgcacctgcggggcatccgggacgccggtggcagatactgccaagagcaggacatgtgctgtcgaggccgtgctgacgagtgtgccctgccctacctgggagccacctgttactgtgacctcttctgcaaccgcaccgtctctgactgctgccccgacttctgggacttctgcctcgggattccaccccccttccctcccgtccaagggtgcatgcatgggggccggatctacccagtcttcggaacctactgggacaactgcaatcgatgcacctgccatgagggagggcattgggagtgcgaccaggagccgtgtctagtggacccagacatgattaaagccatcaaccgaggcaactacgggtggcaggctgggaaccacagtgccttctggggcatgaccctggatgagggcattcgctaccgcctgggcacaatccgcccatcctccactgtcatgaatatgaatgagatttatacggtgctgggccaaggggaagtgctacccactgcctttgaagcttcagagaagtggcccaacctgatccacgagccattggaccagggcaattgtgcaggttcctgggctttctccacagcagctgtcgcatctgatcgcgtctctatccattctttgggacacatgacacccatcctatcaccgcaaaacctgctgtcctgtgatacccaccaccagcagggctgccgaggtgggcgtcttgatggcgcttggtggttcctgcggcgccgcggggtggtgtctgacaactgttacccattctccggccgtgagcagaacgaggccagccccactcctcgttgtatgatgcacagccgcgccatggggcggggcaagcgccaagccacttcccgctgccccaatggtcaggttgattccaacgacatctaccaggtcacgcctgcctaccgcctgggctctgatgagaaggagatcatgaaggagctaatggaaaacggccctgttcaagcactcatggaagtacacgaggacttcttcttgtaccagcgtggcatctacagccacacacctgtaagccaggggaggccggagcagtaccgcagacatgggactcactcagtcaagatcactgggtggggagaagagacgctgccagacggaaggaccattaagtactggactgctgccaactcgtggggcccatggtggggtgaaaggggccacttccggatcgtgcgtggcaccaacgagtgcgacatcgagaccttcgtgctgggcgtctggggtcgcgtgggaatggaggacatggggcaccactgagtctcagccactaggcgaggtgggatccacagccacagaagaggccttgggggccatgcccgatgaagccttgtgtgcacttcgggaccaggtgctaatctctacagactcagatccgcgcgtgcgcgctaaggcagaatcccacctaggagacaaagatgcaccaggctggcggaagcccccagatatcacagccggaactgggaagggccctgtttggaaactgcagggagtatagacagattccaggtccctggtcagccaggccaagaccacaggagctaagacaccccaacctcatcaccctcctacccaccctctctctcatcttctttttgatgaattctgtccatctccctagcctccattttggttgtacctttccattctcagtactgctttcttattctttaaagatatttatttttcttttcattaaaataaaaccaaagtattgataaaaaaaaaaaaaaa

SEQ ID NO: 576 - DNA, 2618 bp, Mouse
ggcggcgggaagatgcggttgcggctcctagcgctggcggcggccgtgctgctgggtccggccccggaagtctgtggtgctctcaatgtcacggtgtccccaggacctgtggtggactacttggaaggggaaaatgccaccctcctctgccacgtctcccagaagagacggaaggacagcttgctggccgtgcgctggttcttcgcccctgacggctcccaggaggccttgatggtgaagatgacgaagctccggataattcagtactatgggaacttcagccggactgccaaccagcagaggctacgcctgctcgaggagcgtcgaggggtgctgtacaggctgtctgtcctgacgctccggcccacagatcaagggcagtatgtctgcaaagtgcaagaaatcagcaagcaccgcaacaagtggacagcctggtccaatggctcctcggcgacggaaatgagagtgatctccctcaaagctggcgaagattcatcatttgagaaaaagaaggtgacttgggcattttttgaagatctctatgtgtacgctgtccttgtgtgctgcgtggggatcctcagtgttctgctcttcaccctggtcattgcctgcagtctgtgtttcacaagaggaaatcaagagtgagacattatttggtgaagtgccctcagaacagctcaggggagactgtcaccagtgtgaccagcttggccccactgcagccacagaagggtaagaggcagaagaagaaggtagatgttccacctgcagtccctgccaaagcgccgatagccaccactttccacaaaccaaagctgctgaaaccacagaggaaagtcgccctgcccaagatcaccgaggaaaacttgacctatgccgagctggagctgatcaaaccacacagggctgccaaaggcgtccccaccagcaccgtgtatgcacagatcctcttcgaggagaaccagctgtagcgatacctcctctctggctgtcatgtgttctcccagttgtttatgacactcagaaacaaactccctagttttgtattttcacccgtgccttcagtgtgatggggagccccttcccacagcgttctgatgtcttctaagaggtacacacttcccagaagagaagggaccagctcttggccatgcctcccaagataagaggcccctggcctgattctgagcacaaggactctgcttctgagagcattgctgagccaaccgtaccaacttctcctcttcttaagccttaaagttttgagggaaaaatcaaatcttaattttaatcagccccccttgttctgtataacaagcatccagtttatagccacaggaaatgctgtaaaggtcacagagagaaatgggatatatggactgacaagttctctaaggctctgggacacccaggacagagcaaacccctggaggtggtggcaggagccacttatgatgacatccattgcttttaatagatgctctgaaactggccatgtgagggcagagatgctgatggttgaaagccggagatctggctcagaaaattctggtcttatgtctttagagccatacttcaccagggctgtagatctacaagaacacccttgtaaagtgtttgtccccctttagcagaatggacctagagagacatattgttctctcttttccaaagacttgagtatggctccagtgggtacatcgggtaagtgagcaaagcatgcaagctcagtcaactccattcaagatagagtggagcctttcaccattccctcagcagagaaatgaaagcacaaggcatgccgggaaactatgtccaggaggactcaacccttggcaagtgctttgaccgtctcaatcttggatgagaaccatgattgccttgggtggatgtcaggggaccatgggacataagtccgtggggaagtgactctgtggacctaaacaatgtacaaaaatgtcagacttaatggaagtaagagagtcaccttgatttccgcagtgctattgatgcttcttgatgtatactctggtggccacttactgcactttataaacattgtctggctttgtaattttacaatgtatatatgataaattatctattttaaacacagctagggtgtgcattgtgccctctgtctcactgtgggacttgagttttttattaccttaacttggatcacagctacacaagttgtgggaatgggggaacccactgaacattgccttttaatggggaatagaagcctcacagcatccctgccgagcttgtctctctgactttttcaaagggaaaccgcagcagcaccctcagagcagggacaatgagcagtttgtacctggtgcttgtttgaagtaacatattttggggttcttgatcagaaaatgtgtctagtcgctcttcctttaccacatagaccactaaccgtgaattgacatttctgaagctaagtgaggagaagcatccatcatctggaaagtgcaaagggttcttcttgcgacaaggcatcaataggagcggtgatgtaatcactgagtagttccccaaatggacagctgcttccagtgttccatgcaattaaagcaagcatgacctcaaaaaaagaaaaaaaaaaa

SEQ ID NO: 577 - DNA, 1480 bp, Mouse
gggctcccaggtgatcggtgtgtgtcagcctcactccagggcctccagggaaccatggacttttggctttggttactttacttcctgccagtgtctggggccctgagagtcctcccagaagtacagctgaatgtagagtggggtggatccattatcatcgaatgcccactccctcaactacacgtaaggatgtatctgtgtcggcagatggccaaacctgggatatgctccactgtggtgtccaacacctttgtcaagaaggaatatgaaaggcgagtcaccctgacgccatgcttggataagaagctattcctagtggagatgacacagctgacggaaaatgacgatggaatctatgcctgtggtgtgggcatgaagacagacaaaggcaagacccagaaaatcaccctgaatgtccataatgaatacccagaaccattctgggaagatgaatggacctctgagcggccaagatggttgcacagatttctgcagcaccagatgccctggctccacgggagtgaacatcccagctcttctggagtcatagccaaagttaccacgccagcttcaaagactgaggcccctccggttcaccagccctccagcatcacttcagtaacccaacatcccagagtttacagagcattttctgtgtcagctaccaagtccccagcgctcctgccagcaaccacagcctcaaagacttccactcagcaagcaatcaggcccctagaggccagctacagccaccacaccagacttcatgagcaaaggacacgccaccatggcccacactatgggagagaagaccgagggcttcacatccccatcccagaatttcacatcctgattccgaccttcctgggctttctcttgctggttcttttgggactggtggtaaaaagagccattcaaaggaggagagcctcctccagacgtgcgggccgactggcgatgaggaggcgaggccggggggcttcccgcccgttccccacacagcgccgggatgccccgcagaggccgcgctcgcagaacaacgtctacagcgcctgcccccggcgcgcacggggaccagacagcttgggtccagcggaggctccgctcctcaacgccccagcctcagcgtcccccgcttctccgcaggtacttgaagctccttggccccacaccccatctctgaagatgagctgtgaatacgtgagcttgggctaccagcctgctgtcaacctggaagaccctgattcagatgattacatcaatattcctgacccatctcatctccctagctatgccccagggcccagatcttcatgccaatgagttctgcctgtttgctgatgtctagcacgttttccttataggatccctgtcatggcgtatgtcctataccctaagtcgactctcacctgactatctgaatgccttgagaatgatcaattacaggctaatttttcaccccaaaaaaaaaaaaaaaaaa

SEQ ID NO: 578 - DNA, 802 bp, Mouse
gctgagccaggatgaaggctctcagggctgtcctcctgatcttgctactaagtggacagccagggagtggctgggcacaagaagatggtgatgcggacccggagccagagaactacaactacgatgatgacgatgatgaagaggaagaggaggagaccaacatgatccctggaagcagggacagagcacctctacaatgctacttctgtcaagtgcttcacagcggggagagctgcaatcagacacagagctgctccagcagcaaacccttctgcatcacgctcgtctcccacagcggaaccgacaaaggttacctgactacctactccatgtggtgtactgatacctgccagcccatcatcaagacagtgggaggcacccagatgactcagacctgttgccagtccacactgtgcaatattccaccctggcagaacccccaagtccagaaccctctgggtggccgggcagacagccccctggaaagtgggactagacatcctcagggtggcaagtttagccacccccaggttgtcaaggctgctcatcctcagagcgatggggctaacttgcctaagagtggcaaggctaaccagccccagggaagtggggcaggatacccttcaggctggaccaaatttggtaatatagccctcctgctcagcttcttcacttgtctgtgggcgtcaggggcctgaagacccgttctcctccaaccaggacgccctggcctctccttcctgacaaccagcttcagagaataaacttgaatgtcgtttgccatctaaaaaaaaaaaaaaaa

SEQ ID NO: 579 - DNA, 2112 bp, Mouse
gggtgctcagacggtgaaaatcagagatcaggccacctttctgtgagccttcagctgagtctaaaggtgttattgatcagaatggcttcaggatggttttacctgtcctgcatggtgctgggatcgctgggatcgatgtgcatcctcttcactgcctactggatgcagtactggcgcggtggctttgcctgggatggcacggtgctcatgtttaactggcacccagtgctcatggttgccggcatggtggtgctctatggagctgcctcactggtgtaccgcctgccttcatcgtgggtggggcccaggctgccctggaaagttctccatgcagcactgcacctgctggccttcacctgcactgtggtggggctgattgccgtctttcggtttcacaaccactcgagaatcgcacacctctactccctgcacagctggctgggtatcaccactgtagtcctcttcgcctgccagtggttcctgggctttgctgtcttcctcctgccctgggcatcccagtggctgcgaagcctcctgaaacctctgcatgtattctttggagcctgcatcctttccctgtccatcacatctgttatttccggcatcaatgagaagcttttctttgttttgaaaaatgccaccaagccctactccagcctgcctggtgaggctgtctttgccaacagcacagggctcttggtggtggcttttggcttgctggttctctatgttcttctggcttcatcatggaagcgtccagatccaggagctctgactgatagacagcccctgttgcatgacagggaatgaagcgggcaggggctcctgggaacggtcagcgatgcggtctctgctccctcagaagttctgctgtactggggctcctggctggtttcagcaacagacttctcttgggccagagacccaaccttgctactccagttgcaggctctcgctgtccagccactagctgttcctctgcttttcttgtggctttggcttattgccgtttttttctggtcctccattggcacaaagaccttcttgccttggtcacacatgtctcttctgctggtctgcagatttgggctgctttccttaccactcctagggatgtgggagaagccaaagctggggttcaaatgcagtctacacgtgtaaaatacaaagtctgctctctgtgggagcatttgtcttagttaggtatgcttccccctctgctctgtcctggatgtgtatttgggtgggcagttgcattgaggggtcattcatgggacagtggcagccggagaagcctctgctgtaaagtcaggtgcccagtactctgctcttttcactttgatgtgctgtattgtgtggattgtgaccttgtgattccccctcttctagctgctgctccagctgcttcctggatcccgccctttccctgtgacttacatgcctgttcccctcaggtagcatgacgagccgttaaacagttctcccaagaacacatgtcctgtccctagagtccctcccagtgatgagtctgaggtttctttggccttcctttctgtccctttgtgggtatgggctttcctgcctcctctagttatgctctcccctgacagggccccagcccactatgaaattgaaaccagcattatgaagcaatttgctgggagccattcactgctgctgccttcagagatgttccttagtgagtagtgggtgcttctgttccccaaaaggtcactcagctaccctctatgctataccagaatgtgagctttgctcttctgaatagaaactgggtagagagggaggagtcttgccccactcctttgtgttagccctgccaggtccctcaacaggcaggcaggcaggcaagcaggcagacaggcaggcagagttgggttcctgaactctctgcagacagtggccaggctgccagacgttgggaggagggctggcatggatttgctgactaaatggaagcctgaacacatagcgatgactcttggcacccacatgaacatcttcctggttcactcatgagtgggtattttacttcatgaatcttatttttattaaatatgtttttaaacatcagaaaaaaaaaaaaaaaaaaaa

SEQ ID NO: 580 - DNA, 919 bp, Mouse
ggaagtaagttcagaggccatgagactgcctctgccactgttgctactgttcgggtgcagggctatcctggggagcgccggggatagggtttccctctcggcttcggctcccacactggatgatgaagagaagtactcggctcatatgccggctcacctgcgctgcgatgcctgccgggctgtggccttccagatggggcaacgtctggcgaaagcagaggctaaatctcacactccagacgccagtggattgcaggagctgagtgaatccacgtacacagatgtcctggaccagacctgctctcagaactggcagtcctatggagttcatgaagtgaaccagatgaagcgtctcacgggcccaggacttagcaaggggccagagccaagaatcagcgtgatgatttctgggggtccctggcccaataggctctccaagacgtgtttccactacctgggtgagtttggagaggaccagatctatgaagcctaccgccaaggccaagcgaatctggaggcgctgctctgtgggggcacccatgggccctgctcacaggagatcctggcccagagagaagagctttagtccaacctgctgcacttctggatcttctctaattttattattattaatggctgattagaggcaggctctcatcatgtaggccaggctggccttaaacttgtcatcctgctcagcctcgaaagtgctgcatttaagtcctgagcctttttgtgcttgaccctcctatataattttttcaactgtggtggtggggaggggacagggaagcctgactctagctgtcaatcttctccctccacctctcgatggggtactgggactgaggctgcctttctactttcaaataaagctttgaaagaccaaaaaaaaaaaaaaaaaaaaaaaaaaaaaaaa

SEQ ID NO: 581 - DNA, 1308 bp, Mouse
gtgagagctcagctggaagtgactgggtgacaaggcgcacaggctcagccgtggaagctccatcatgattccacaagtagtgaccagtgagactgtcacagtgatttcaccaaatggaatcagctttccccaaacagacaaaccccagccttcccaccagagccaagacagactgaagaaacatctaaaggctgagatcaaagtgatggcggcaatccagatcatgtgtgctgtgatggtgttgagtctgggaatcattttggcatctgttccctccaatctacactttacctcagtgttttccatcctgttagaatctggctacccatttgtaggagctttgttttttgccatctctggaattctgtctattgtcacagagaaaaagatgactaagcctttggttcacagcagcctagccctgagcatcctgagtgtcctctctgctcttacaggcatcgctattctctctgtcagtttggctgctttagagcctgccttgcagcaatgtaagctggctttcacacaactagacacaacccaagacgcttatcatttctttagccctgagccattaaacagctgcttcgtggccaaagctgctctgactggagtcttttcactgatgctaatcagcagtgtgttggagcttggcctggctgtcctcactgccacactgtggtggaaacagagctcctctgctttctctgggaatgtgattttcctgtctcagaactcaaagaataaatccagtgtatcttcagagtcactttgtaaccctacatatgaaaacatattgacttcataagaattaagtagaggttatatagcagaaaaatctgtctttaacatgatttagaaaagccatttactgtgtgacaacaatgcttaatatcttaatatcttaatgtgtgtattggttaatcagcaaccatgaaaaacatactaactggctgggttcagtagcacgctcttgatttggcgtcagtcaaaacacagacctgtaaattccaatttatgtagtggtcaaagagccccaattattttctcaaaaaactggaagaatgtttcataggatcatggtggagccaatgggcaacagttcttcttatccttgtcacttggctgcaggaggtactgactagggcctgagatcatattctgtgtgcgtggcatggacttcatggcatctattttattcataagcacatgaaaacaagtcatctcttatgaagtctcaaagagcataaaaaagttagcctccaaataaagtctttatgtaatcccaaaaaaaaaaaaaaaaaaaaa

SEQ ID NO: 582 - DNA, 1288 bp, Mouse
gctccagctcctccatcctgtagtttacagggtgtaccctatgtcgggaccaatgtgaccctgaactgcaagtccccaaggagtaaacctactgctcagtaccagtgggagaggctggccccatcctcccaggtcttctttggaccagccttagatgctgttcgtggatctttaaagctcactaacctttccattgccatgtctggagtctatgtctgcaaggctcaaaacagagtgggctttgccaagtgcaacgtgaccttggacgtgatgacaggtcagtaagggggtccaaggctgcagtggtcgctggagcagttgtgggcacttttgttgggttggtgctgatagctgggctggtcctgttgtaccagcgccggagcaagaccttggaagagctggccaatgatatcaaggaagatgccattgctccccggaccttgccttggaccaaaggctcagacacaatctccaagaatgggacactttcttcggtcacctcagcacgagctctgcggccacccaaggctgctcctccaagacctggcacatttactcccacacccagtgtctctagccaggccctgtcctcaccaagactgcccagggtagatgaacccccacctcaggcagtgtccctgaccccaggtggggtttcttcttctgctctgagccgcatgggtgctgtgcctgtgatggtgcctgcacagagtcaggctgggtctcttgtgtgatagcccaggcactcattagctacatctggtatctgacctttctgtaaaggtctccttgtggcacagaggactcaatcttgggaggatgcccacattctagacctccagtcctttgctcctacctccttctattgttggaatactgggcctcagtaagactaaaatctgggtcaaaggacaaaaggaggaaatggacctgaggtagggggttgggagtgaggaggcttcacttcctccctgcttctccctgaagccagatgaatgctgcggaagatcggctaccctccaagggctctggaggagactgccagtcagtgatgcccctggctctgtgatctgtacaacacccttatctaatgctgtcctttgccgttcgctccatctccctgtattaatataacctgtcctgctggcttggctgggttttgttgtagcagggggataggaaagacattttaaaatctgacttgaaattgatgtttttgtttttattttgcaaattccaataaagatacatcgcatttgcatggccaaaaaaaaaaaaaaaaaaaaaa

SEQ ID NO: 583 - DNA, 999 bp, Mouse
gccagctttttcctccgcagccatgtcctggtctccgatcctaccatttttgtcccttctgcttctgctgttcccactcgaggttcccagagcagccactgcgtccctttcgcaagcatcctccgaaggcacaaccacctgcaaggtccacgatgtgtgcctcttggggccacgcccattgcccccttcaccacctgtcagagtcagcctgtattatgagtccctgtgtggagcttgtcgctacttcctcgtccgggatttgttcccaacctggctgatggtgatggaaatcatgaacatcaccctggtgccctacgggaatgcacaggagagaaatgtcagcggtacgtgggagttcacgtgccagcacggggagctggagtgtagactgaacatggtggaggcctgtctgctggataagctggaaaaggaggcagcgttcctaaccatcgtctgtatggaggagatggatgatatggagaagaaactgggaccgtgcctgcaggtgtatgctcctgaggtgtcaccagagagtatcatggagtgcgccacaggaaaacggggcacacagctcatgcatgagaatgcccagctcacagatgccctacacccaccccacgagtatgtgccctgggtgctggtcaatgagaaacctttgaaggaccccagcgagctcctgagcatagtctgtcagctggaccagggaacggagaagccagacatctgctcctccattgccgactcccccaggaaggtctgctataagtaaaggcataacctcaaactcgtcccagaaaactgcccagcttcttcaaattgccaacctgcaagagctgctgcctcgctatgaaaaccttgcacatgtcccacaaagcccagactccagacttctcagagacaaggatcttgccttattttcaaatggtgctaaatttaaattcatagaataaatcatctatactcctgtgattcctttttcctaaaaaaaaaaaaaaaaaa

SEQ ID NO: 584 - DNA, 2123 bp, Mouse
gctgtcccgtgtcctgctgtggaaactgctgcttcttcagagctctgcagtcctgtcctcagggccttcagggaccgcagcagccagcaactctctggtgtctgagtctgtggtgagcttggcagccggaacccaggctgtgctacgctgccagagcccccgcatggtgtggacccaagaccggctgcatgatcgccagcgcgtggtccactgggacctcagcggggacccgggcagccaacggcgccgacttgtggatatgtattcggcgggtgaacagcgcgtgtacgagccgcgcgatcgcgaccgcctcctgctgtcgccttctgctttccacgacggcaacttctcgctgctcattcgcgctgtggagagaggcgatgaaggggtgtacacctgcaacctgcaccatcactactgccacctcgatgagagcctggctgtgcgcctcgaggttacagacgatcccctattaagtcgcgcatactgggacggtgagaaggaagtgttggtggtggcccatggcgcgccggcactgatgacctgcatcaaccgtgcgcacgtgtggactgaccgccatttagaggaggcgcagcaggtggtccattgggaccgacagctacctggagtgtcacacgaccgcgccgaccgcctgcttgacctgtatgcatctggcgagcgccgcgcctatgggccgcccttcctgcgtgatcgcgtgtcagtgaacaccaacgcttttgcacgcggtgacttctccctacgcatcgatgagctggagcgagctgatgagggcatctattcctgccacctgcaccatcactactgtggcctccacgagcgccgagtcttccacctacaggtcacagagcctgcctttgagccaccagctcgtgcttctcctggcaatgggtctggtcacagcagtgctcctagcccagatcccaccctgacccgaggccacagcatcatcaatgtcattgtcccagaggaccacacacatttcttccagcaactgggctacgtgttggccacgctgctgctcttcatcttgctgctcatcactgtagtcctggctacacgacatcgtcacagcggaggatgcaagacgtcggacaaaaaagctgggaagtcaaaggggaaggatgtgaacatggtggagtttgctgtagccacaagggatcaggctccatataggactgaggacatccagctagattacaaaaacaacatcctgaaggagagggctgagctggcccatagtcctctgcctgccaaggatgtggatctggataaagagttcaggaaggagtactgcaaataaatggaccctgagcttctggctgggccagcagctctgtatcaaaggacatctccctgaccctcctgcggtattcctggctcttctcagcggctggtccgacttacctagaaacttggcctaaacttggcagagcagctgcctgtactttgcccttcctagaatcgccacccctcatcttggtgagcaactgtgggttccctagagactctggtatagtacgattgctgcccttcagtcacctgtgcccactgatggtcggacccccaacttaaacacaacaaagatcccttgttaatatccaccaaatgcaaagtccctcgtggcctcttactgctagggtcaggaagacacttaaaaattccaggtaaaactccctagccaccagttaaacacattagccattgtcctgggggggggggggtcttcctgagctgcatcgtgcctgtgtcctgctcagagccctgctgttataggttgtgactcatgggcccgccttgctgctttgggcaacttgaggctagcccagggccctttctctgcttctgattcctttctgcccaatgcctcccaagagctacaccagcagtttctgggtaccgtatgacccttggccttgacatccctccctaggctggagtctggggttggggccccatttgtcctctgttttggctgaagatggggtgaagatttggctgagtggcctatgctgtcacatcaaacagctatcatttactcctacttggaaagttgtcatgtgacaataaaagatacatttgacttttaaaaaaaaaaaaaaaaa

SEQ ID NO: 585 - DNA, 1864 bp, Mouse
ggcaccgcgcgggcggctatggagcgagcctgaggcccgccaggatatgaattggctccctctgaccgccatttcagtgcttgtaagtgtgaggtcagcaactgcagcctacagattgataactgtcgaacccctggaattgtggaggcactgcagtgaagaaatatgtaatcatggaatctccttgctaatcgtcaccacctgttccctgtgataagccagccaggacgtgggctgaggagaaggaaaagaggccaccatgaagctgaagcagcgagttgtgctgttagcaatactcctcgtcatttttatcttcaccaaagttttcctgatagacaatttagatacatcagctgccaaccgagaggaccagagggcttttcaccgaatgatgactggcttgcgggtggagctggtgcccaagttggaccataccctgcagtctccttgggagattgcagcccagtgggtggtgccccgggaagtgtatcctgaagagacaccagagctgggagcaatcatgcatgccatggccactaagaaaatcattaaagctgacgtgggctataaagggacacagctaaaagctttactgattcttgaaggaggacagaaagttgtctttaagcctaagcggtacagcagagactatgtggtagaaggggagccatacgctggttatgacagacacaatgcagaggtggcggccttccatttggacaggattctgggtttccgccgagctcccttggtggtgggcagatatgttaatctgcgaacagaagttaagcctgttgccacggagcagctgctgagcaccttcctaactgtagggaacaatacttgtttctatgggaagtgctactactgccgagaaacagagccagcatgtgctgacggtgacatgatggagggctctgtcacactttggcttccagatgtgtggcctctgcagaaacatcgacatccctggggcaggacctaccgagaaggcaaactggccaggtgggaatatgatgagagctactgcgatgctgtgaagaaaacatccccctatgactcaggcccgcgtctcctggacatcattgacacggctgtctttgattacttgattggcaatgctgatcgccatcactacgagagctttcaagatgatgaaggcgcgagcatgcttattcttcttgataatgccaaaagctttggaaacccctcgctggatgagagaagcattcttgcccctctctatcagtgttgcatcattcgggtttcaacctggaatagactgaattatctaaagaatggagtactaaagtctgccttaaaatctgccatggcccacgaccccatctcccctgtgctctccgatccacacttggacactgtggaccagcggcttctgaatgtcttggccaccatcaagcagtgtactgaccagtttgggacggatactgtgctggtggaagacaggatgccactctcccacttgtaattctcaatgcgaaacaagtggaactgattttacaaagatagagaaacagcacaatcaattccgaatggcatgcgatggtctgcaggtggccacagtgggtgctggtggcagaagacggtggcggccctgggagtgctcggtgttttctgcagtgcaagctacggaccacagttcagctgcctcacctctcaggctgccagcagcagctctgctcagtctttattcccacaccagagggcgagcaggtgtgacataggctaaggaagtgtttccagagtgtgcgtctcgggtgacccttgctgtcttttctctacacccatggattctctgaaaacactttgcagttccttgtgtcttaaaaaaaaaaaaaaaaaa

SEQ ID NO: 586 - DNA, 1391 bp, Mouse
gctggcaggctgctgtgcagtccacgaggaaggcttcggtcgacaggacaggcgtgcagacttcaggagggaccctgggcagcagacattccctggaagggcaggttgcattgcatggttggctcatggaggcagcagaggtggcctcagccaggcctgggcagcatcagcccccggcagcagcaagacgctggctgttccacctgcccacaagaacagccaccaccagtacccaggggatgactagcggccggaccacaggccacaaaaagaagaaggctaccccacttacagatgcagaccatgtggggctccggagaactgcttgtagcatggtttctagtgttggcagcagatggtactactgagcatgtctacagacccagccgtagagtgtgtactgtggggatttccggaggttccatctcggagacctttgtgcagcgtgtataccagccttacctcaccacttgcgacggacacagagcctgcagcacctaccgaaccatctaccggactgcctatcgccgtagccctggggtgactcccgcaaggcctcgctatgcttgctgccctggttggaagaggaccagtgggctccctggggcttgtggagcagcaatatgccagcctccatgtgggaatggagggagttgcatccgcccaggacactgccgctgccctgtgggatggcagggagatacttgccagacagatgttgatgaatgcagtacaggagaggccagttgtccccagcgctgtgtcaatactgtgggaagttactggtgccagggatgggagggacaaagcccatctgcagatgggacgcgctgcctgtctaaggaggggccctccccggtggccccaaaccccacagcaggagtggacagcatggcgagagaggaggtgtacaggctgcaggctcgggttgatgtgctagaacagaaactgcagttggtgctggccccactgcacagcctggcctctcggtccacagagcatgggctacaagatcctggcagcctgctggcccattccttccagcagctggaccgaattgattcactgagtgagcaggtgtccttcttggaggaacatctggggtcctgctcctgcaaaaaagatctgtgataacctctcaccacccaggctggatagagcagtcatccctagatcccttgtagccagagttcaggcgctgtctggtggtgcctatgagcagaaggccctgcctcattgtccctctttcttaggaggttcctaggacttgggcatggggagtggggtcttgtgtgactcttcagtggggctccctgtctaagtggtaaggtggggattgtctccatctttgtcataataaagctgagacttgaaaaaaaaaaaaaaaaaaa

SEQ ID NO: 587 - DNA, 2324 bp, Mouse
gggtctgtactccccgctcctcgccacacacacaccgagaggatgaggctcaccgtgggtgccctgctggcctgcgccgccctggggctgtgtctggctgtccccgacaaaacggtcaaatggtgcgcagtgtcagagcacgagaataccaaatgcatcagcttccgtgaccacatgaagaccgtccttccgcctgatggcccccggcttgcctgtgtgaagaaaacctcctatccggattgcatcaaggccatttctgcaagtgaagccgatgctatgaccttggatgggggttgggtgtacgatgccggcctgactccgaacaacctgaagcccgtggcggcggagttttatggatcagtggaacatccacagacctactactacgctgtggctgtggtaaagaagggaacagacttccagctgaaccagctcgaaggcaagaagtcctgccacacaggcctgggaaggtctgcaggctgggtcatccccattggcttgctcttctgtaagctgtcggagccccgcagtcctcttgagaaagctgtgtccagtttcttctcgggcagttgtgtcccctgtgcagatccagtggccttccccaaactgtgtcaactgtgcccaggctgtggctgctcctccactcaaccgttctttggctacgtaggcgcattcaagtgtctgaaagatggcggtggggatgtggcctttgtcaagcacacaaccatatttgaggtcttgccggagaaggctgacagggaccaatatgaactgctctgccttgacaatacccgcaagccagtggatcagtatgaggattgctacctggctcggatcccttctcatgctgttgtggctcgaaaaaacaatggcaaggaagacttgatctgggagattctcaaagtggcacaggaacactttggcaaaggcaaatcaaaagacttccaactgttcagctctcctcttgggaaagacctgctgtttaaagattctgcctttgggctgttaagggtccccccaaggatggactacaggctgtaccttggccataactatgtcactgccattcggaatcagcaggaaggcgtgtgcccggagggctcgatcgacaactcgccagtgaagtggtgtgcactgagtcacctggagagaaccaagtgtgacgagtggagcatcatcagtgagggaaagatagagtgtgagtcagcagagaccactgaggactgcattgaaaagattgtgaacggagaagcggacgccatgactttggatggaggacatgcctacattgcaggccagtgtggtctagtgcctgtcatggcagagtactacgagagctctaattgtgccatcccatcacaacaaggtatctttcctaaagggtattatgccgtggctgtggtgaaggcatcggacactagcatcacctggaacaacctgaaaggcaagaagtcctgccacactggggtagacagaaccgctggttggaacatccctatgggcatgctgtacaacaggatcaaccactgcaaattcgatgaatttttcagtcaaggctgcgctcccgggtatgagaagaattccaccctctgtgacctgtgtattggcccactcaaatgtgctccgaacaacaaagaggaatataatggttacacaggggctttcaggtgtctcgttgagaaaggagatgtagcctttgtgaaacaccagactgtcctggataacaccgaaggaaagaaccctgccgaatgggctaagaatctgaagcaggaagacttcgagttgctctgccctgatggcaccaggaagcctgtgaaagattttgccagctgccacctggcccaagctccaaaccatgttgtggtctcacgaaaagagaaggcagcccgggttaaggctgtactgactagccaggagactttatttgggggaagtgactgcaccggcaatttctgtttgttcaagtctaccaccaaggaccttctgttcagggatgacaccaaatgtttcgttaaacttccagagggtaccacacctgaaaaatacttaggagcggagtacatgcaatctgtcggtaacatgaggaagtgctcaacctcacgactcctggaagcctgcactttccacaaacattaaaatccaagaggtgggttgccactgtggtggagacagatgctccctcccgtggcccatgggcttctcttggtcttcatgccctgaggggttggggctaactggtgtagtcttcgctgctgtgccttaccacatacacagagcacaaaataaaaacgactgctgactttaaaaaaaaaaaaaaaaaaaaa

SEQ ID NO: 588 - DNA, 1859 bp, Mouse
ggcgcacctaccccagcctatgtgcgctccgcaaggagaaccgagccgctcgccagcggggcgcgctcccggctgtgccagtgcagaagggtgcctgcgaggaagcagggaccacaagagcagggcggctccggagaaagtacaacttcatcgccgcagtggtggagaaggtggcgccgtctgtggtccacttgcagctgttccgcagatgacagacacacaggttcccacactgatctaaaggaggagacaccatcctggacccagatctcagttgtgttcagaaaagatggccaggacgagcttcaggcagctcacaaagcacatggaagtggatcacctctcaccaaccaggaaatcccttcctccagcggctctgggttcatagtgtctgaggatgggctcattgtcaccaatgcccacgtcctcaccaaccagcagaagatccaggtagagctccagagcggggcccggtatgaagccaccgtcaaagacatcgaccataaactggaccttgcactgattaagatcgagccagatactgagcttccagtactgctgctgggccgatcctctgacctccgggctggagagtttgtggtagctttgggcagcccattttctctgcagaacaccgtgactgcagggattgtcagcaccacacagagaggcggcagagagctgggactgaagaattcagacatagactatatccagacggatgccatcattaaccatggaaattctgggggtccgctggtgaacttggatggcgacgtgattggtataaacactctgaaggtgactgcagggatctcttttgcgatcccctctgatcggatcagacagttcctggaagactatcatgagcgccagttgaaaggcaaggcccctttgcagaagaaatacctgggtcttcgaatgctgcctctcactctgaacctccttcaggaaatgaagaggcaagatccagagttccctgatgtgagttctggagtttttgtatatgaagtgattcagggatcggctgctgcaagctcggggttgagagaccatgatgtaattgtcagcataaacgggcaacctgtcaccaccacaactgatgtcattgaagctgttaaggacaatgactttctctccatcattgtgcttcgaggaagtcaaaccttgtttctgacagtcacacctgaaataatcaattaagtatcttactttgagaaactgcctagcaaaaccagttatattacctggttttgtatcgaagaggtgccagagatggcagggtcttctggagatcaagaaaaatggatgctttaaatgcagaagttcatgtttgtgtgcatacatcaacacacacacacacacacacacactcatggatcctgaggttgagagtgctcttctgccgcaaaaccttcctaactcaaatggaaacagctatggtgatctgataaaacttgatgacagtaagaactggaaagcaggcaattcctaactaaatcttgataggaaactttagttacctcctatacagccacaaactggtatgtcacgcacatgtacacataattacctaccaaatattaagaacctgaatctggagtaaagaggtaatcacattttaaataatacccctttgtatactgaatttcccaggttatatccactctgggccagggtttgtggatagaaaggtcatcacctataagacatcttggagctgatgacatcatactaccacacaggagtgtgatcattttggaggtagaaacaatttcggacctttagagtttctgagaatgtcttctatttctattaaaataatttttcgaaccgttaaaaaaaaaaaaaaaaaaaaa

SEQ ID NO: 589 - DNA, 724 bp, Mouse
atgcctgcctgtcgcctctgcttgctggccgctggcctcctactagggttgctactgttcacccccatctcagccacaggcaccgatgcagagaaacccggcgagtgcccccagctcgaaccaattacggactgtgtgttggagtgcactttggacaaggactgtgcggacaaccgcaagtgctgccaggcgggctgcagctctgtctgctccaagcctaatggaccgagcgaaggagagctctcagggacagatactaaactctcagagactgggactactactcaatcagcgggccttgaccacactactaaaccaccgggaggtcaagtctccacgaagccaccggctgtgaccagggaaggcttaggtgtccgagaaaagcagggcacctgccccagcgtggacatacccaagctcggcctctgtgaggaccagtgtcaggtggacagccagtgttctggcaacatgaaatgctgccgcaatggatgtgggaagatggcctgcaccacacccaaattctgagcttcagcctccagcagcctgaggaacggagagaggttgtttctgccggactgtgcatctggagtcgttcctgtggcctcctttctctctggtctttgcatttcttcctggtccgacgaaagcatctcctttttctaaccaataaagtgatcgttttcagcaatggagaagctataaaaaaaaaaaaaaaaaaaaaaaa

SEQ ID NO: 590 - DNA, 2395 bp, Mouse
gaaagaatagagacagagaaggagtttctgcattcttgggatcacaaaccagaccatgaaagctggcattcagaatgcctgcctaccaaaagtctcagcaaggcccagcaagctccacaggatgcttttcaagggtggctctgtggtgtgggtacggccaaaggtggggaaagccagtctttgggagcagactctttgtaggagtctgcccttccctcttcccctgcccactccactctgacagccacaggtggaatgatgagggcccaaatgtgggacatctatgctcagatattaaacctaagctcacgtaagaagtgggcaaagactggccctggtttgtctgtaagagacccagagtttcccaacccccctgccatgagctaggtcatcacactaatttgttgatgtttgctcctgtttgccttaaggatagtgacccttgcctgacgcagatgtcatgtttaggcattaagtgtccataggtcattccgtagggcatctagtacacgtcggttcacaaatctacttccaagaccctcagaatccttcattaaagggctgggcctgggtgtctgaatttctgatgagctccctgcaatatggttaaatgcactataactggaggtcagagccttagaaccggggggagcagagccaccttgtaaatgttatcaggctaatcacaatgagatggccccactgctagctacgtctcagcctccatcagctcttgctgcctcttccacagctgcttacatctgggacacttgtgccccattcccaggccatacaagcctggaaggtgggctggacagcctcctccctgacctacatgggaaggtctctccttttcttcccgcccttttttctaatgtggatgcttccattaatcctctgtttctggagccttggaagatctgtcttccattcattcatccacccatccatcattcaacatgaatgggtcatgtcacgtgttgggtgcaagggatactctttcaaaacaatccctcacgagactcacagtctagtgaagagcacacgccagaaaccaattagagaagctaccaaccacgatggaacatcagggattcaaaacctcggggtgagagggagcctactttctctgtgttcttctaagagccctgatggctctcgattgctctgaacagaggtccacttggtccagtgctatcatgggtagtgcccacgaggtttccccagagaatactactgtagagcattctatactccccacagggagacaggaaaggattcccagagccatggctcttaagatggtcctcgaaggaaaatccagtcatttccaagtgggccctgaaccctgaggctatggggaggtcttcagaagtcctggaagagtgacaacacccgagtcccaggagctctgtgatggcaaccttctcccttgaacacccttttccatttttgagcatcgagttggagaggtgattctgggacagggtgtgtatatttgtgttgtttaaacacattcacatgtaagctgcctgaggggaggggatgtttgcctctagctcagtcccagtggagctggggggatgatgagtctgagtggctttagggccatcattgacaccacctcagtacaaacggactcccctcccttcctccctctcttctatcctcctttccttccttcccttagcagggctgccaaggtgatatgggacagcgacagggcaaacgatcacctgttgccttaatgaactttccacagctcactgctggctaggtcgtagagtttctccttgtcttgtgaggcccaaggaaggaggccaatctaaagtgtcctccataccttccccttgggggcttttctgtaatacttgtttaaaaattgttctgatgatcatgatggaaacagacagaccaccttagaaccagaggcctgaaagcctgacctgaccagcacagattcccacttcagaaccccagggctatggaagtgcccttgtccaacgctatgggaatagtcctgtgggttgtctctgcttgccactgtggccagcattccagtgcctacagccacctgtgcctacagccacctgtgccatgagaagtgcctctcctgctctatgccctgcatttgggatgctaagaagaggtgagggtgtgagcgagaacagatccacccttctcctaggtaggatcagctctcaattggtgcttatcactagttatcaaagaacagcagagacagctgcgttatccaagaagcaagtattaggaccaaaacctgttactgtatttaaaggaactttagtttgcgtatcttacatttttataaagtactgtaattcagggggtggggtatgcaacagagacagactaacccatgtttgtcatttgc

SEQ ID NO: 591 - DNA, 909 bp, Mouse
ggttggccaccctggttcaagtctccaggattcgtgcatactcacagggacagacccaggatcagcagggtagctccagcttggacaaggttgccgttcctcgggagcagacacactccggcttggagcagatccagcagattcagcagcagctgactcagttcaacgcctcgctggctggcctgtgccggccctgtccctgggactgggagctcttccagggaagctgctacctcttctccagaaccctgggcagctgggaaacctctgcctcctcctgcgaggatctcggggcccacctggtgattgtcaacagtgtttcagagcagagattcatgaaatattggaatgtgaggaaaaaccaacgctcctggatcggcctcagtgaccatatacatgaaggttcctggcagtgggtggacggcagtgccctcaagttcagcttttggaaagagggggaacctaacaatgacggagatgaggactgcgtggagctgttcatggatgattggaatgataataagtgcactgaacagaacttttgggtctgtgagcagccctctgctccctgccctcatcactgaagatctgtgctcccctagtcacacaggcaacttggggacactttgctcccattccagctgccttattcatcccagtacccctgttctgaggcctttgagatcctgagagagttcctgaggcaccctaccctgcagtgcttccctcttcctctgtaggtgatttcagttccacaaatcctgagctcaggagtcccctcagtagaatcatacatataaggagttggggtgtagctcaatataatagagtttgactagcatgggtgactctctgattccattctcagcacccaaataaaaaataaaatattaaattcaaaaaaaaaaa

SEQ ID NO: 592 - DNA, 881 bp, Mouse
gtgaggaatggcgaccttttttttaaaaaggtgcaggtcgaggatgggggtgtgtatacctgttacgccatgggggagactttcaacgagacactgtctgtggagttgaaagtgtataacttcaccttgcacggacaccatgacaccctcaacacagcctacactaccctggtgggctgtatcctcagtgtggttctggtcctcatatacttgtacctcaccccttgccgctgctggtgtcggggtgtggagaaaccttccagccaccaaggagatagcctcagctcttctatgctcagtaccacacccaaccacgaccctatggctggtggggacaaagatgatggttttgaccggcgggtggccttcctggaacctgctggacccgggcagggtcaaaatggcaaactcaagccaggcaacactctgccggtgcccgaagctacaggcaagggccaacggaggatgtccgatccagagtcggtcagctcggtcttttctgatacacccattgtggtgtgagcagcgtaggctgatggggaggttctgccccaggagaggtacccctgagggatatgacagggtggaagagagggctggatgcccaagggagtgggttcctcctgaccaccagggaatcggtcacaggcgccggaggaggcaagaccccagtgagggtgtggatgctgcgagtttcacctatggatatcctcaggcagatgccacacccctacccaaagccttggctattctcagtgtgggggagggggacaggaacgaggaaagggcggaggggaggagcaaattccctaaacttttttgaggtcatccctagctccttaagagaaaaccatttgaaaaacaaaaaaaaaaaaaaaaaa

SEQ ID NO: 593 - DNA, 556 bp, Mouse
gcaccactcccctggctcgagtcatctcccgggacactgaaacacagagatattacctgctaagtcacacacctgcctgcagtctcaccctgggtcctgatatggaggaaatcacctgtgcctttctcctgctgctagcaggtctgccggccttggaagccagtgacccagttgataaagacagtcccttctactatgactgggagagcctgcagctgggaggattgatttttggagggctcctgtgcatcgctggaattgccatggccctgagtggcaagtgcaaatgtaggcgtacccataagcccagttccttacctggaaaagccactccactcatcattccaggctctgccaatacctgctgaactgaacacaggaccaagtttggaggcaggtttttgacaactttctgccgtacttctcctctggagaccttcctctccaggatggcttccctagaacatactgttaagtcttcattgacaggaaagggtgtggcaaagctgattttatattaaactggtcttgctgctcaaaaaaaaaaaaaaaaaaa

SEQ ID NO: 594 - DNA, 750 bp, Mouse
gctgagtgtggttctgggtggaaccctctacataggccattatttagccatgtattccgaaggcgcccccttctggactgggatcgtggctatgctggctggagctgttgccttccttcacaagaaacggggtggtacctgctgggccctgatgaggacccttcttgtgctggcaagtttctgcaccgctgtggctgccatcgttattgggtctcgtgagttgaattattactggtattttctcggagatgatgtctgtcaaagagactcttcatatggatggtccaccatgcctagaaccactccagttcccgaagaagctgataggattgccttgtgcatatactacacaagcatgctaaagaccctgctcatgagcctccaagctatgctcttgggtatctgggtgctgctgctcctggcttctctcacccctgtatgtgtctacatctggaaaagatttttcacaaaggcggaaacagaggagaagaaactgctgggtgcagctgtgatctagcctttcctcttgctccgggcgtccctcctactgaagcctgaaagaagaatcaggcaggactaagaagaccctcccccactagcagggccatggccactgcctggttctgcccagcaccacagcagctctcagcagcacttgcttgtctctccatccttcaccgtcctatatccctcctcaggcagcaacttgataataaactctcctgttattgctggcaaaaaaaaaaaaaa

SEQ ID NO: 595 - DNA, 1896 bp, Mouse
gtgaacatctgtctcccttactgcgggtggccagccacagtgccccggagggatctgcacaatgctccagcacactagcctggtgttactcctcgcctctatttggaccactaggcacccagtccaaggtgccgacctcgtgcaagacctttccatttctacatgcagaatcatgggcgttgcccttgtgggcagaaacaaaaacccacagatgaatttcacagaagccaacgaggcctgtaagatgctgggactgactctggccagcagggaccaggtagagtcagcgcagaaatctggctttgagacttgcagctatggatgggttggagaacagttctctgtcatccctcggattttctcaaaccccaggtgtgggaagaatggcaaaggtgtcctgatttggaatgctccctccagccaaaagttcaaagcctattgccacaactcatccgacacctgggttaactcctgcattccagaaatcgttaccacattttaccccgtgttggacactcaaacacccgcaacagagttttctgtcagcagcagcgcctacttggcttcatcccctgactccacaacacctgtttctgccaccacccgggctccacctttgacctccatggcacggaagacaaaaaagatttgtatcacggaagtttatacagaacctatcaccatggctacagaaacagaagcatttgttgcaagtggagcagcattcaagaacgaagcagctgggtttggaggtgtccccaccgccctgctggtgctggctctcctcttctttggtgctgccgctgtgctggctgtttgctacgtgaaaaggtatgtgaaggccttccctttcacaaccaagaatcaacagaaggaaatgatcgaaaccaaggttgtaaaggaagagaaggctgatgacgtcaacgctaatgaagaatcaaagaaaaccattaaaaacccagaggaggccaagagtccacccaaaactacggtgcgatgcttagaagctgaagtttagatgcaagagagtggagaaggtgcacacgaggcaagtttcatgccccgggaaccaaagaagcaagccactgtcagttcctgcagaaaaagactgcagagttcaccagaaggagccctctccttactgcagtcttctctggactctaccctctggcctccaaccttcccacagcctccctaacccttctgtggctcacagcagaccagagagtagagggagctttcaaagtaccaggtcctaaaacagctcctaagctcacactcagagacaggcttccaggttgcctgacccccatgaaaggccagagtccctgagacatggccagccccatagttcaaaatcttcccacagggaaatacaccacctggccgtgctctttggaaccaggcacatgtaaaataaggaaaggaaaacaacagaaggtcatggagagcctgggtgacttgagacttaatctctggaaagccaaaataaacagagcatgagatgggagctggggccacagatagcagccttgttggctgagactgtaaatacaggctggggctgagaagcctctcggttaattgatctgcagcacgtagacagactttcttttctttttactgttgctggtgttctctagagacaaatacacgtttataagaaacctaaaagcaggagagcccaggagctgactcagtggtaaagcacttgcccggcatgtacaaacaaggcttccagtccaatccccagaatccactgaccccacacacacaaagaaacaaacacaagtatgcatttccattttttacttgaattacaggacccatggctgagaaaataactgtgttaaaaggttaaaaaaaaggagaaaagtacaaaaaaaaaaaaaaaaa

SEQ ID NO: 596 - DNA, 1854 bp, Mouse
gcccacatggtctgggccaacttggctgtgtttgtcatctgcttcctgcccttgcatgtggtcctgaccgtgcaggtctccctgaacctcaatacctgtgctgcccgagacaccttcagccgtgccctgtccatcacaggtaaactctcagacaccaactgctgcctggatgccatctgttactactacatggccagagagttccaggaagcgtccaagccagccacgtcttccaacacaccccacaagagccaagattcccagatcctgagcctcacctagaagaagtgaacacatgccaagggccagaggaacctgtgatgtgagcaaggagccctggatcagcctgaacctcctgtggggtctgagcactctaggagacccagttggactagagaggctgcatctgctcccctgaaaggaccagaggactcaggctctaacgtccgacctgagggaccctggaacaagaccacatatctcccattccagatctagaaaccctgggcaccagaatggggccttgatggctagccactgagtttaggatacacccctccccagagttggtcctggcaaggtcctctgtcacctagatgcaagtgatgagagataaaggacagacatacggctcagagaaccaggagacatctttccagaggaccctcaaatggcttcttccttttaggacctttaaacttcatgccacatgtagggttgggcaaaagggcagcagctgtggtctggcaggctgtcctccaaggcccatgactgtcactgttgctccagctctgtattatgagggttccagctcaggagacccagtggtcataacatcatgttgagcaatcggacctgagcctcttctggttatttccattctatagtgggactgttgattcctgaggacagtggctatggtagaggtctctggagtttattgtgaggaagattgctgtttggtattcatgctctctgaggatgtggccccaggcttcgaggatctctggagtaaaggatgagccacaaagccagctttgagtcaggagcacatttggagatgtggtagccctgggcttccccctcaatgctttgatttttgtcttggtccaaatgctacagctgtacccagagccagagcccctccagctcaggggaggggggtactggctctccctactctctacccctacttcatccaaggcctactgcctaactgacccctttttttgtatgaccttttctacaaaaaccaaaaatctgttcatccttcagacaccagagaaaggattccactcaagtataaattggtgaactgatttcctggagttacttacaaaagcacggtgactcttgggtgctcagtcactgaaaagcctcactcagcatagataacaatccccaaactgcaccgctagattaccaatccccactaaacttccacctcacacacacacttggacacctgacctgctccagacaaaaatgtgcctagggtgtgaggaagctgtggctgcgacccaaggtgtgctgaccctcttcgctctgccaaggactactaacagcttcatgatcatcagcctattcgccacagccgtattttgcttgtttcactggcatgactgtaggccgagctgttctgtggatcagagcagcgcttttcctgttcactgctgatgatcatcctaagccagagaaatggcttctctgccacactggcccactctccctccagttctcacatcccctccaccctctgttctgcagtattatctaaaccttcaccttggaaggaagggatggtgtatctatataatatcaagatataggatccacaaaaaaaaaaaaaaaaaa

SEQ ID NO: 597 - DNA, 1318 bp, Mouse
gggctggcagggagccccagatccccgtggccttggccagctttcccagccctacatgggaggagagatgccctggaccatcctgctgtttgcatctggctccttggccatccctgcaccatccatctccttggtgcccccctacccaagcagccacgaggaccccatctacatctcgtgcacagccccaggggacatcctaggggccaattttaccctgttccgagggggagaggtggtccagctactacaggccccctcagatcggcctgatgtaacattcaatgtgactggtggtggcagtggtggtggcggtgaggctgctggggggaacttctgctgtcaatatggtgtgatgggtgagcacagtcagccccagctgtcggacttcagccagcaggtgcaggtctccttcccagtccccacctggatcttggcactctccctgagcctggctggagctgtgctgttctcagggctggtggccatcacagtgctggtgagaaaagctaaagccaaaaacttacagaagcagagagagcgtgaatcctgctgggctcagatcaacttcaccaatacagacatgtcctttgataactctctgtttgctatctccacgaaaatgactcaggaagactcagtggcaaccctagactcagggcctcggaagaggcccacctctgcatcatcctctccggagccccctgagttcagcactttccgggcctgccagtgaggctgacgaatgaggaccactttatccagttccttccctcccactgccagaggctgcacatctgtccagagacttggcagtggaggtagggtgggggtgggaatcaagccatagctttcttagggaagcactggccaaaggaaggggactcctagagttgtaaccttcctcacagaagacaagaaaatgagttggggtatcagcctcaggctagacagagagccagaacctcttcacagattcccagatccccggagaagcccttattgaatccggacacccagtcaggcacaagaggtttacattttttaactcctttccagtgtttccccaacggtcacttatttccagactgcgtgttttatttttagaaaaaatgtgtatattttttgttcctgttgttgtttataaaaagggtctcactgtgaacccctggcttttttggaactccctgtgtaaagcaagccaccctcaaattaataaatccacctgcctttgcctccagatcgctaaaattaaagtttccggcataacccctaaaaaaaaaaaaaaaaaaaaaaaaaaaagaaaaaaaaaaaaaaa

SEQ ID NO: 598 - DNA, 2866 bp, Mouse
ggtttcggagagataaggcgcttggccgttactaactggactacaaagagctggatcggaccggaaccacatggctcaactcgcccgagccacccgctccccgctgtcatggctgctgctgctgttctgctatgcactccggaaagcgggtggggatatacgtgtgctggtgccctacaattcgacaggcgtcttgggagggtcgaccaccttgcactgtagtctgacttctaatgagaatgtgactatcactcaaataacctggatgaagaaggattcaggtggatcccacgctcttgtggctgtcttccaccccaagaaggggcccaacatcaaagagccagagagggtgaaattcttggctgcccaacaggatctgaggaacgcatctctggccatctcgaacttaagtgtagaagacgaaggcatctatgaatgtcagattgccacattccccagaggcagtagaagcaccaatgcctggctgaaggtgcaagcccgacctaagaacactgcagaggccctggagccctctcccaccttgatactgcaggatgtggctaaatgcatctctgccaatggtcaccctcctggacgaatctcttggccctcgaatgtgaatggaagtcaccgtgaaatgaaggaaccagggtcccagccgggcaccaccacagttaccagctacctctccatggtaccttctcgccaggcagacggcaagaacatcacctgcacggtggagcatgaaagcttacaggagctggaccagctgctggtgaccctttcccaaccctatccacctgaaaacgtgtccatctctggctatgacggcaactggtatgttggcctcactaacttgaccctgacctgtgaagctcacagcaaaccagcgcctgacatggctggatataactggagcacgaacacgggtgactttcccaactctgttaagcgccagggcaatatgcttctaatctccaccgtagaggatggtctcaataacacggtcattgtgtgcgaagtcaccaatgccctagggtctgggcagggccaagtgcacatcattgttaaagagaaacctgagaatatgcagcaaaatacaagattacacctaggctacatctttcttatcgtctttgtcctcgctgtagtcatcatcatcgcagcactatacactatacgaagatgcaggcatggtcgtgctctgcagtccaatccctcagagagggagaacgtccagtattcatctgtgaacggcgactgtagactgaacatggagccaaacagcacaaggtgacggtgctgggtagacagaactaaggaacttgaaggcatagcaactggaaccctactctcataaatgaagaagcctccagagagactggctgctcagtgtgatgagcatagcaagtttggggggtctcccaggatgctgccgaattccacgttgtcaaaaggacccatggaggccagtgtgttggctcactcttgacatctcagcaagctgggggggggggggggagcataaagcaaggttgagtctagcttgggctatagagcaaagccctgtccatacacaaacaagctaaggggctttgagacggtcagaaactgaagtcttgctttgggtaaggtaaatcctctaccgcatgtatgtgctagacttgaaagacttccacacagacctctttataagttgactccattggggctatcccctcctctctggacaaggtctctgtatgtagccaaggctaggctcaaactcacagagatatgtctgcttctacctccccagtgctagagttgaaagtatttgtgccactgcacttttctaggtcttcttttaatgaagtaaagtatatatttataaaaagctatttagttatatatatatatatttttgagactatttcatagagcccaagctaacctcaaacttactatgtagccaagagtgatggtaaactaatttattttaatttatttgtcttcaattttaaccatcacccaacccctgctcccttccatatcttctttcaatccatttcattgtctttttcttcccagacactattctgacttacgtctccattacaaacattttattgaactacataaaaatgtgtgaaccacaaaaaaaaaatgtatttgtcaaaattgtagttgtctttctgaggctgacctgagttctctgataccattctctccagttgtatccagtttcctgtaaacaatgtgactttgtttttctcagtagctaaaacatcccaattatgtgagtgtacactttctttactcattcctctgtgggccaccagctgggttggttccatatctgagctattgtgcatggaattgtctctgtggtgggtttagtaaactcccaggaatgcctgtacatgtttgtagaggccagaagaaggcacaaaatcttgagccaggcttacatgcacttgtgagtagccccacataggtgctaagaacccagttcaggtcctctgctgtgggatggtgggctgtgcacagaaagcctggtcccggtctagcaaaggtctggaactccggagccggtgggctgtgatttacaccagcatgggatggaaggagttggacctcgcctcctgggcacctggctcctgtcacatagctacagcctcccacagcccccctatagggaggtatgcagcatcaatcacatagtagctgcactaagccctcccacatgcaaataaggtttccccaaactctcagtccaagccaatgaaaagtacctgctgtcaaaccctaaatcatccccaaaactctgtaagtcctatcagggaataaaatgtgtgtgaaaactaaaaaaaaaaaaaaaaaaaaa

SEQ ID NO: 599 - DNA, 1093 bp, Mouse
gcgaccactgagaccttgagactcagacaccaagagagatgtttctagttgggagcctcgttgtcctctgtgggctgctggcccacagcacagcacagctggcaggcttgccattgcccctgggccagggtccacccttgccactgaaccagggcccaccgttgccactgaaccagggccagctgttgcccctggctcagggtctgcctttggctgtaagcccagcactgccttcaaatcccacagatcttcttgctggaaaattcacagatgctctcagcggtggcctgctgtctggggggctgctgggcattttggaaaatattccactcctggatgttataaagtctggaggaggcaattctaatggccttgttgggggcctgctgggaaaactgacgtcatcagttcctctcctgaacaacatcctcgacataaaaatcactgatccgcagctgctagaacttggtcttgtgcagagtcctgatggccatcgtctctatgtcaccatccctctgggcttgacactcaacgtaaatatgcccgtagttggaagtcttttgcaattggctgtgaagctgaacattactgcagaagtcttagccgtgaaagacaatcaggggaggattcatctggttcttggtgactgcacccactcccctggcagcctgaaaatcagcttgctcaatggagtcactcctgttcaaagctttttagacaacctcacagggatattgactaaagtccttcctgagctgatccagggcaaggtatgtcctctggtcaatgggattctcagcggtttggatgtcaccctggtgcacaacattgctgaattactgatccatggactacagtttgtcatcaaagtttaggcatcccaggaaggaaggctatcttggctgagctgaatcatttcttgctgctcagtctcctgcctcttgcccagtctcccatggctcacagaaaggggcccacatcctggaaaattatgtcttccttctcctcacggagcctgatctcttcccatcaggcacgattaatcctgtgatcctcactaaataaaatagctcttcatctgcaaaaaaaaaaa

SEQ ID NO: 600 - DNA, 1353 bp, Mouse
gaaacagtatgagcaaacactgagctgaggggagcttctgattaagagcgctccccagcgaggcccgaggccgtgaaccttcccagcaagagggtggtggttgctcctggaagcctgcgcccagcagctgaagccatggccaccaccacgtgccaggtggtagggcttctcctgtccctcctgggtctggccggctgcatagccgccactgggatggacatgtggagcactcaagacctgtatgacaacccagtcaccgccgtgttccagcatgaagggctctggaggagttgcgtgcaacagagctcggggttcaccgagtgccggccatacttcaccatcctgggccttccagccatgctgcaagctgtacgagccctgatgatcgtgggcattgttctgggggtcatcggtatcctcgtgtccatcttcgccctgaagtgcattcgcattggtagcatggatgactctgccaaggccaagatgactctgacttctgggatcttgttcatcatctccggcatctgtgcaatcattggtgtgtctgtgtttgccaacatgctggtgaccaacttctggatgtccacagctaacatgtacagcggcatgggcggcatgggtggcatggtgcagaccgttcagaccaggtacaccttcggtgcagctctgttcgtgggctgggttgctggaggcctcaccctgattgggggagtgatgatgtgcatcgcctgccgtggcctgacaccagatgacagcaacttcaaagctgtgtcttaccatgcctctggccaaaatgttgcctacaggcctggaggctttaaggccagcactggctttgggtccaacaccagaaacaagaagatctacgatgggggtgcccgcacagaagacgatgaacagtctcatcctaccaagtatgactatgtgtagtgctctaagacccgccaacctgtgtgcaggaggaacccttccccaagaagagctcaccccaaagcaacgggagtctaccttgttcccttgttgatttcaactgacatctgaaagttggtaaagcctgattttcatccatagggaggctagacagtcttggccacatgtgtctgcctctaaatatcccatcacaaaacagctgagttatcgtttatgagttagaggccataacactcactttagcccaaccctctgctttttaccgtagactttcttttcatctggtgatggaatggaatttgactcacagactaatactttaatggtttagagaaactttccttcctcgtacttaataagcctgctgatggtcgattttccagcttgaccaccaagggaaattttaaaaaaaaaaaaaaaaaa

SEQ ID NO: 601 - DNA, 3198 bp, Mouse
ggtctgcagctgcgggaggccatggggcgcttcgccgctgcattggtgggctcactgttctggctggggctgctgctatgtggtctgggcagtctggcgagcgccgagccccgggccccgccgaacaggatcgcaatagtcggtgctggaatcggtggtacttcctccgcctattatctaaggaagaaatttgggaaggacgtgaagattgacgtgtttgagagagaagaggtcgggggccgtttggccactttgaaggtgcaaggtcatgactacgaggcagggggttcagtcattcaccccctaaatttgcacatgaagcgatttgtcaaagagctgggtctctccagtgttcccgcttcaggtggcctggtgggcgtgtacaatggaaagtctctggtgtttgaggagagcagctggtttgtaatcaacgtgattaagctggtgtggcgctatgggtttcagtccctcagaatgcacatgtgggtagaagacttgttggacaagttcatgaggatctaccgttaccagtcccatgactatgcctttagcagtgtagaaaagttgatgcacgccatcggaggggatgactacgtcagactgcttaaccaaactctccgtgaaaacctgaagaaagcaggcttctccgagacgtttctcaacgagatgattgctcctgtcatgaaggtcaattatggccagagcacagacatcaacgcctttgtgggggcggtgtcattgacggctgccgattccaacctctgggcagtggaaggtggtaataaaattgtttgctcggggctccttcaggcctctagcagcaatcttatatctggctccgtaatgtcaatagaggagaagacgaggaccaaacagacaggaaaccccaccaagatgtatgaagtggtatataaaacaggatctgagacccattctgacttctatgacattgtcctcgtggctgctcctttgaaccggaagatgtccaacataactttccgaaattttgatccgcccatcgaggaattcaatgacccatatcaacagctggtgacaactttcatcaaaggagaactcaattccactctcttcagctccagacccaaggatcagtttggcctctcggcaattcttgtcactgatgactccgatatgtttattaacagtctgtccattgtggcctctgtaagacagaaggagggtcccccacccgcggtggatggcctgcacgtgtggaagaccttctccagggacatcctcaccaaagaacaaatttcaaagctcttcctgtcctatgattatgctgtgcggaagccatggctgtcctatcctcactatgagcctcctcagaaatgtccctccatcatcctccacgaccggctctattacctcaatggcatcgagtttgcggccagctgcatggaaatgagcgccattgccggctacaacgcagctctcctcgcctaccaccgctggaacggcaatgaggacatgattgatcaggacgacctgtatgaaaggcttaagacggagctgtaactgagcactgcccctcccccgagcgtcctgctctcgaaggaccgagtcagcagagaggaatttgaacctttcctggtactcctcatgtgggtcatgagaaaacacagcgttcctgttcctcggagaatgtgttcttctgtcagaatgtctcactctggatttggggcggtacaggaggattgaacctgaggccccgtgcatgctgggcaagtgttcccctcttgagctgagctatatccctagccctcctttgtggtttttcttttgagactgggtctcactaagttgtccaggtggaatcctcctgcctcagtctccggagagcctgggatttgattccaggccctccacatgaggcgtggctggataactggggaaacattggattttcccaggcttgtctggttttaagagtcacctggaacttcataaacatctgggttaggtcattgggctggtgtgggcctgggtttgtttagattgtaatcttttcttgtctctcttttcttcttctgggggatgttacaactagggtcttagtctgcaccccaggctggaactcattatgcagcccaggctggtcttgaaatcacagcaatcctcctgtctcagcctcctatgtgctggaatacagatgtttcccagttcctggcagtttatactcttttgatgagaatgttctcaaagcctgaagtcctgactttaagaatgtgacttttgattgcttctgcctcggctttatcagggatagattcagagatagaagcagagatagcctgtgatttggaaccaaatatataaactattaacttgagaaactatttaatatataaactattaacttgaggaggtctgtttttctatactgtggggattgaacccaggaccccgagtatcccagacaaatgctctaccactgagatacattgccagcctcaagagcttcaggatcgacatccagagaatggaatttcctaggttgaagatggggtcttggctctaaagctttgtcaagatcaagttcctcgcatgcagccaagggtgagcaggtcctgggtgtcagatagagagctttgagtgccttaaaagtgctaagcaacacaaatcaaaaccacagcagaccggtgccagaggtgactggctgctcgatggttaatcagctgtggtctccaagggaacgaacactagagcagaggcggcctgagtgagcccagagcagttggccttagaaccaggtcttcatggctgcgtgagttcagagggacgcgtatcagatcctgggcatgcgcagtgaggggccgttgctgaaatcttaatacagtggcgctcagttgtagctgcacatgggagtcagatttctcttacgtagacaagctcaagaaatcgggtgtttagtccactgctcataggtctccagtgactatcatagccactagtattaagagggaaaaaaagtaattttgcctgctttggtggaacttgcctgtcatccaaacctttgtgacaaagcgaaaggatcaaaagttcagagccagcctgggctgtggcaacaccctatctcaaggaataaaaatcaaaactcttcaccaggttaaagcgtggtttcaatgaaccggtcttccaaagcaaaaaaaaaaaaaaaaaaaaaaaaaaaaaaaa

SEQ ID NO: 602 - DNA, 1046 bp, Mouse
gcctcagtccacagctgtctccccagctgcttccagtgaacaccccggcagtctaggctcccacagcaatgagttggtggagggacaacttctggatcatcttagctatgtccatcatcttcatctccctggtcctgggtctcatcctgtactgtgtctgcaggtggcagcttagacaaggcaggaactgggaaattgctaagccctcaaaacaggatggaagagatgaagaaaagatgtatgagaatgttcttaattcttcaccaggccagttacctgctctgccacccaggggttcaccttttccaggagacctagccccacaggaagctccaagacaaccctcagcttggtactcatcagtgaagaaagttaggaacaagaaggtctttgctatctcgggctccaccgagccagaaaatgattatgatgatgttgagattccagcaaccaccgaaacccagcactctaaaaccacacctttttggcaagctgaagtgggtttacacagctcgttttagaatactctagaatagccggattataacacaagcacttcctaatccccagaggaagccacctcagccatgtgaaagctacagcagaagacaggacagcttgatgttcccgaggctccagatgtttctgttgctccagatgtttctgctgctccagatgtttctgttgctccaaatatttctgctgctccagatgtttctgttgctccagatgtttctgttgctccagatgctcctgttgctccagatgctcctgatgtttctgacactgcagaagctctaccccaagattctgaggatgtggccttggcacctttgtggaggaagtttccttagtgcagaccactgggcctgtgagaactgactcatttctcaacattttctttcgttccctgggtgaatgtagctgtaaggcagtgactctcaaccttcctaatgcagggatccttcaatacaattccttatttgtggtgatcctcaaccataaaattattttgttgctacttcaaaaaaaaaaaaaaaaaaaaa

SEQ ID NO: 603 - DNA, 1261 bp, Mouse
gcacagacgggtaaaccgcttgggaacctcgaggaaaaagaggctacgaaaaccttttcctaagaggctacaaatttggaagcagggaaaacccagacatgagatgtttttagtttatttctccagaagggggcactgtatcaattatgtgaagggacatgcagacagcctagctccatggtgctgtggggtaggactgaggagccctctggccagaccccagcacggccatgtctctcccaaggatcatgttcctggaggtcacgcccctggtccttctcataagtggctgtgcacagcagctctctggaggtatttggaacattctgctgtcacacatgggactgctcttcctgaagcccacgctgttcgtgggaaacatgggaagaaaggaagacgtgttgtgtgctgctcagtagacttcccacaagccacctctctcttctgaaacgtcactgaatggactggagaggactgcgggtttataaaactgctttttatctgagaacaatgggtttggaaactagtctcttttcttcccacttttacagagcttctcaaatcattcctccaggccctgacttggacaggtaggggggcagaccctgggtcccaaggtgcactgtccaggcacactgcccacattgctaagagaagaggccctgctgccagtggacccttcaccccacacgagacacctgtcttgcctttaggacaccctcctctagagagtggtgttggaaggaggggacctatgtaaggagttggggcaggcatgaatctgccaaatactggatatggatccaaggctggcccaggcacctgcacctccagtgagtggtcagcaggtggcgctgctgcccgccaggcttcacagagtccctttagggagtctgctcccagatcccttctggtgcacacttactggatgtcactgcaagctctaccctctgagcaggtgttgcaccacagtggcgctgaccctggccccgcaacggcaactgctgaaggcagccattgcctcagccattctcaagacccttcaatttttaaaagcagttcgattctgtaatatttatttttctttttgaggatgtttcgttgccccgcagactgactgcagtgtgcaccattgcatgagccctgcctcagtgccctgtggctccctgggcactgctgcccctctgtctaaagctgactgtggcagcactgcccaacaataaagctgacctaaaagctgaaaaaaaaaaaaaaaaaaaaa

SEQ ID NO: 604 - DNA, 995 bp, Mouse
gctcacccgcgtccgggcgcgcgcaggccccgtctccttgccttccaggcctcatgcgctcccgcgcctggctcccgcgaccgctgcccggaggaggggggcccgcgttgtctgcgcgtctacgcaggcctcataggcaccgtggtcacccccaactacctggacaacgtgagcgcgcgcgttgcgccctggtgcggctgtgcggccagtggaaaccggcgcgaagaatgcgaagccttccgcaagctctttacaaggaacccctgcttggatggtgccatacaagcctttgacagcttgcagccatcagttctgcaggaccagactgctgggtgctgtttcccgcgggtgtcctggctgtatgcactcactgccctggctctccaggccctgctctgattaggaacatgaaccgtggacgacacagctgactgccatgtctcccgatgactgctcactgagctgaaactcccttgccctcaggtctgctgccctttgcaggcctggacccttgtgtggctgtcctctggattgggggctggaggctagggtctgactgaaaagcctgtgttcccctgtcagtaggcatcttgtccgttttcttccccatcctagagctgagcacccatagatgaggcctcattgggtcccctgggcttacagagcaggacagagactagcccccgctcctagaattcggaactgtccttttccaagatgacaaggcactaaggagatcatatgaacaggctgacagacaaggctgcctaaataccctcccagttagccattattcaccattaagcttacccgtgtcacagcactgacgtggcttgtcacctatgacacagtgtgtagacattaaggagagactgaggtccctcctgctcagcaccccactggcttcccaggctttccctgccatggtttccccagcacctgcaggggctcaataaacccatgtgcactgagaaaaaaaaaaaaaaaaaaaaaaa

SEQ ID NO: 605 - DNA, 5758 bp, Mouse
ggcggtgactttagagaaagctccgtgccctccagcaaaccagaggacttgggagcagctgcatgttgagtctccaggatgaggccagcgcttgccctgtgcctcctctgtcctgcgttctggcctcggccagggaatggggagcatcccacggccgatcgcgcagcttgttcggcctcgggggcttgctacagccttcaccacgctaccttcaagagaagggcggcggaggaggcctgcagcctaaggggcgggactctcagcaccgtgcactcaggctcggagtttcaagctgtgctcctgctcttgcgtgcaggtcccgggcctggcggaggctccaaagatcttctgttctgggtggctctggaacgcagcatctcacagtgcactcaggagaaagagcctttaaggggtttctcctggttgcacccggactcagaagactcagaggacagcccactaccgtgggtggaagagccacaacgttcctgtacagtgagaaagtgcgctgcgctccaggccaccaggggagtggagcctgctggttggaaggagatgcgctgtcatctgcgcgccgatggctacctatgcaagtaccagtttgaggttctgtgccctgcacctcgcccaggagccgcctctaatttgagtttccaagctcccttccggctgagcagctccgcgctggacttcagccctcctgggacagaggtgagtgcgatgtgtcccggggacctctctgtttcgtccacctgcatccaggaagagacaagcgcacactgggacgggcttttccctgggacagtgctctgcccctgttccgggaggtacctccttgctggcaagtgtgtggagctccctgactgtctagatcacttgggagacttcacctgcgaatgtgcagtgggctttgagctggggaaggacggacgttcttgtgagaccaaagtggaagaacagctaaccctcgaggggaccaagttgcccaccaggaatgtaacagccactccagcaggtgctgtgacaaacagaacatggccaggtcaggtctatgacaagccaggagagatgccacaggtcactgagattcttcagtggggaacacagagtactttacctactgttcaaaagaccccacaaaccaagccaaaagtcactggcacaccatcaggaagcgtggtcctgaactacacatcttcgccccctgtttctctgactttcgacacctcttccacggtggtcttcatacttgtgagcatagcagttatcgttttggtcgtcttgaccattacagtgctggggcttttcaaactctgcttccacaaaagccgttcctccaggacagggaagggagctttggactcaccaggtgtggaatgtgatgctgaggctacctctttgcaccacagttctacacaatgcactgacattggagtgaagagcgggactgtggcctgaaggactgagcttaggttcttcactggctgggtgcgctcttggatcgggacacttagggaaacacctcaatgctcacatcttgcctagactttttcagtcccaacaattggggaaagaagaaaattttcagtgattactgtggaagtcctccttcccatacattttattttgtgctaaatctgaaagagacacttgttccctgaaaggggaagaggtggaagctgtgggctggtattggaagacagggtaaaaaatggcaagagacattttcctattctctgggggaatttgaagaaatgcttgaatatttccagtactgggaacaaataaataacactataattttttgaaaaaaaaaaaaaaaaaaactcgagttttttttttttttttttctgcgcaagttaggttttgtcaaagaaagggtgtaaaacgcagctcagtaacagtccgcctagaagcacttgcggtgcacgatggaggggccggactcatcgtactcctgcttgctgatccacatctgctggaaggtggacagtgaggccaggatggagccaccgatccacacagagtacttgcgctcaggaggagcaatgatcttgatcttcatggtgctaggagccagagcagtaatctccttctgcatcctgtcagcaatgcctgggtacatggtggtaccaccagacagcactgtgttggcatagaggtctttacggatgtcaacgtcacacttcatgatggaattgaatgtagtttcatggatgccacaggattccatacccaagaaggaaggctggaaaagagcctcagggcatcggaaccgctcgttgccaatagtgatgacctggccgtcaggcagctcatagctcttctccagggaggaagaggatgcggcagtggccatctcctgctcgaagtctagagcaacatagcacagcttctctttgatgtcacgcacgatttccctctcagctgtggtggtgaagctgtagccacgctcggtcaggatcttcatgaggtagtctgtcaggtcccggccagccaggtccagacgcaggatggcgtgagggagagcatagccctcgtagatgggcacagtgtgggtgaccccgtctccggagtccatcacaatgcctgtggtacgaccagaggcatacagggacagcacagcctggatggctacgtacatggctggggtgttgaaggtctcaaacatgatctgggtcatcttttcacggttggccttagggttcaggggggcctcggtgagcagcacagggtgctcctcaggggccacacgcagctcattgtagaaggtgtggtgccagatcttctccatgtcgtcccagttggtaacaatgccatgttcaatggggtacttcagggtcaggatacctctcttgctctgggcctcgtcacccacataggagtccttctgacccattcccaccatcacaccctggtgcctagggcggcccacgatggaggggacctcgtgccgaattcggcacgaggcgcgctgctggaggtgtgaggagcttagactcgggattgggggggtggaggcggctcctgagaccgaaaaggacttgcgactcgccggccacgcaccatgagggtcctgtgggtgttgggcctctgctgtgtcctgctgaccttcgggttcgtcagagctgatgatgaagtcgacgtggatggcacagtggaagaggacctgggtaaaagccgagaaggctcaaggacagatgatgaagttgtgcagagagaggaagaagctattcagttggatgggttaaacgcatcacagataagagaacttagagaaaaatctgaaaagttcgccttccaagctgaagtgaacaggatgatgaaacttatcatcaattctttgtataaaaataaagagattttcctgagagaactgatttcaaatgcttctgatgctttagacaagataaggctcatctccctaactgatgaaaatgcactcgctggaaatgaggagttaacggtcaagattaagtgtgacaaagagaaaaacctgctgcatgtcacagacacgggtgtaggaatgactagagaggagttggttaaaaatctcggcaccatagccaaatctggaacaagcgagtttttaaacaaaatgacagaagctcaagaagatggtcagtcaacctctgaactgattggccagtttggtgtcggtttttattctgccttccttgtagcagataaggtcattgtcacatcgaaacacaacaatgatacccagcacatctgggaatcagactccaatgaattctctgtaattgctgacccaagaggaaacacactaggtcgtggaacaacaattactcttgtcttaaaagaagaagcatctgattaccttgaattggacacaattaaaaatcttgtcaggaagtactctcagttcatcaactttcccatctacgtgtggagtagcaagacagagactgttgaggagcccttggaagaagatgaagcagcaaaagaagagaaagaagaatctgatgatgaagctgcagtagaggaggaagaagaagaaaagaaaccaaaaactaagaaagttgaaaaaactgtgtgggattgggaacttatgaatgatatcaaaccaatatggcagagaccatccaaagaagtagaagaagacgaatacaaagctttctacaaatcattttcaaaggaaagtgatgaccccatggcttatatccacttcactgcagaaggggaggtcaccttcaagtcgattttgtttgtacccacatctgcacctcgaggtctgtttgatgaatatggatctaagaagagtgattatattaagctgtatgtacgccgcgtattcatcacagatgacttccatgatatgatgcccaaataccttaattttgtcaaaggtgttgtggattccgatgatctccccctcaatgtttcccgtgagactcttcagcaacataaattgctcaaggtgattaggaagaagcttgtccgaaaaactctggacatgatcaagaagattgctgatgagaagtataacgacactttctggaaggagttcggcacgaatatcaagcttggtgtgattgaagaccactcaaatcgaacacggcttgctaaacttcttaggttccagtcttctcaccattcaactgacattactagtttagaccagtatgtggaaagaatgaaggaaaaacaggacaaaatctacttcatggctgggtcaagcagaaaggaggcggaatcttctccatttgttgagagacttctgaagaagggctatgaagtcatttatctcacagagcctgtggatgaatactgcattcaggctcttcccgagtttgatgggaagaggtttcagaatgttgccaaagaaggggtgaagtttgatgagagtgagaaaactaaagaaagtcgggaagcaacagagaaggagtttgaacctctgctcaactggatgaaagataaggccctcaaggacaagatagaaaaggctgtggtgtcgcagcgcctcacagagtctccctgtgctcttgtggccagtcagtatggatggtctggcaacatggagaggatcatgaaggcacaagcataccagacgggcaaggacatctctacaaattactatgccagtcaaaagaaaacgttcgaaatcaatcctagacacccactgatcagagacatgttgcggcggattaaggaagatgaagatgacaagacagtcatggatcttgctgtagttttgtttgaaacggcaacacttcggtcaggatatcttctaccagacaccaaggcgtatggagatagaatagaaagaatgcttcgcctcagtttaaacattgaccctgaagcacaggtggaggaagaaccagaagaagagcctgaagacacctcagaagacgcagaagactcagagcaggatgagggagaagagatggatgcagggacagaagaagaagaggaggaaacagaaaaggaatctacagagaaggatgaattgtaaattatactctcgctatgaatcccgtgtggagagggaatgtgaagttttgaagtcatttcttttgagagacttgttttggatgcttccccaagcctccttctcccctgcactgtaaaatgttgggattatgggtcacaggaagaagtggtttttttagttgaattttttttaacattcctcctgaatgtaaatttgtactatttaactgactattggtgtaaaatcttgtcatgtgtataaaaataaaaaaagatcccaaataaaaaaaaaaaaaaaaaaaaa

SEQ ID NO: 606 - DNA, 1003 bp, Mouse
gcctgagcaccccagtgtccctagacagagcatccttgccttcctgatggctttgctgatctcgcttcctggagggactccagccatggctcaggtcctgcttctgctctcatcaggctgtctgcatgctggaaattcagaaagatacaacagaaaaaatggctttggggtcaaccaacctgaacgctgctctggagtccagggtggctccatcgacatccccttctccttctatttcccctggaagttggccaaggatccacagatgagcatagcctggaaatggaaggatttccatggggaagtcatctacaactcctccctgcctttcatacatgagcacttcaagggccggctcatcctgaactggacacagggtcagacatctggagtcctcagaatcctgaacttgaaggagtctgaccaagcccagtactttagtcgagttaatctgcagtcgacagaaggcatgaagttgtggcagtcaattcctggaacccaactcaacgtgacccaagcactcaacaccaccatgaggagccccttcatcgtcacctctgaattcaccacagctggcctggagcacacaagcgaccagaggaatccttcactgatgaacctgggagccatggtcacgatgctcctggctaaagttttggtcatagtcctagtctatggatggatgatcttcctgaggtggaagcaaaggccagcacactaaagcctaaaccccagcaagaatcagagctcatggctgcaggattgtgctgtgaaacatcaccattcttggatagacatagaagataacccccacttctgccagactctgatactctctgggttctgatattctctcctcagaagccaggtcatactgtgtgtctctgattctcaaagcctgactgtgctgttctctgtctgctcatggagttattaacactttcaataaatgtcttactccaaaaaaaaaaaaaaaaaaaaaaaaaaaaaaaaaaaaaaaaaa

SEQ ID NO: 607 - DNA, 658 bp, Mouse
ggacagaacctgcatcatattgtcgccagcggggaagatggctctgccctggacaatattactggctctctctggtatctatgtccagggagctcaggcatggtgttcggaagaggatactctcgaactcgataaactagtcagtgaacctgacatagtgaagtttgctttgagtgcattccataaaaagagcaaggatgaatatgcctacagggtgatacacatcatgaatttcttgaaagtacaggaagaaccaccacaaactttcttcgtgaagctgaggctgacaagaaccatctgtatgaaattcgagaaaagcctagacacctgccccttacctgaactgcaaaatatcctcatctgttccttcagcatcagcagcccaggctcaaaacagttcaacctgttgaaaatgacttgttctgaggggcttctctgactgggacccaccacaaggatctacttacagcactgatccagtcctgctccttgctctgaggatactgccaatcataggaatcagcaattacaggcttaagaagctctgcgagtgtctgcagtttcatgtcctggaattttagaaatgcccctttgtacagattcatcacatagaattagatcattaaacaccagcatgtaataaaaaaaaaaaaaaaaa

SEQ ID NO: 608 - DNA, 1827 bp, Mouse
gaagaggaagacctccgccgccgcctcaagtacttctttatgagcccatgtgacaagttccgggccaaaggccgcaagccctgcaagctgatgctgcaggtggtcaagatcttggtggtcactgtgcagctcattctctttgggctcagcaaccagctggtggtgacattccgggaagagaacaccattgccttccgacatctcttcctgctgggttactctgatgggtctgatgacacctttgcagcctacacacaggagcagctctaccaagccatcttctatgctgtggaccagtacctgatactacctgagatatccctgggccggtatgcctatgtccgtggtgggggtgggccttgggccaatggatcagctttggctctctgccagcggtactaccaccgtggccatgtggacccagccaatgatacctttgacattgatccaagggtagtcactgactgtatccaggtggatcctcctgacagaccccctgacatccccagtgaggacttggacttcttggatggcagcgccagttacaagaacctcacactgaaattccacaagctgatcaacgtcaccatccacttccagctgaagacaattaacctgcagagcctcatcaacaatgagatccctgattgttacaccttcagtatcctgatcacatttgacaataaagcgcacagtgggcgaatccccatccgcctggagaccaagacccacatccaggagtgcaaacaccccagtgtctccagacatggagacaacagcttccggcttctgtttgatgtggtggttatcctcacctgctccctgtccttcctgctgtgcgcccgctcactgctccgtggcttcctgctgcagaacgagtttgttgtattcatgtggcggcggcggggtcgggaaatcagcctctgggaacggctggagtttgtcaatggctggtacatcctgctggtcaccagtgacgtgctcaccatctcggggactgtcatgaagattggcattgaggcaaagaacctagccagctatgatgtctgcagtattctcttgggtacctccactctgctagtctgggtcggtgtcattcgctacctgacatttttccacaagtacaacatcttgattgccacgttgcgagtggcactgcccagtgtcatgcgtttctgctgctgtgtggctgtcatctacctgggctattgcttctgtggctggatcgttctagggccctaccatgtgaagttccgctcgctgtccatggtttctgagtgtctgttctcactcatcaacggagacgacatgtttgtgacgttcgcggccatgcaggcccagcagggtcacagcagcctggtgtggctcttctcccagctgtacctctactccttcatcagcctcttcatctacatggtgctgagcctcttcattgcactcatcaccggcgcctatgacaccatcaagcacccaggaggtactggcacagagaagagtgagctccaggcctacatcgagcagtgccaggatagccccacatctggcaagttccgtcgtggcagtggctcagcttgtagccttttctgctgctgtggaagggactccccggaggaccattcagctgctggtgaactgatccaagatgattgccactagactttatccccatgtactgctgggaccccagcttatttatttttagaatttgctttaaaagatctgcgtctgacaggccttgtgagggcttgggctgatcgaatcggacacaggggaaagggagggcatgtagggcggctgttaaataaaagggaatgtaaaaaaaaaaaa

SEQ ID NO: 609 - DNA, 3697 bp, Mouse
gcggctgtcaccgccgctgcagcgggactggacggccggacgctgtgggacaaacaggcggccgccagcaggaggcgccgagccgggagcagcggcaggcacagcccgtggccactgcgccgagcccgggcggaactggccccgcgcaattcagccccgcagcacctcgggggcggactccgggcgcagccttcgcgtccggatcgcggtgacaagcgcctccggggccaggagctgggctgtctggcgcagggagagtgaggacacggtgctgggctgctgcgggacccggggcgtcgcgatgaacatcgtagtggagttcttcgtggtcactttcaaagtgctgtgggcgttcgtgctggccgcggcgcgctggctggtgcggcccaaggagaagagcgtggccggccaggtgtgcctcatcacgggcgcgggcagcggcctgggccgcctctttgctctcgagttcgcccggcgccgggcgctgctggttctctgggacatcaacacgcagagcaatgaggagaccgcaggcatggttcgccacatctaccgggacctggaggcggccgacgctgctgctctgcaagctggaaaaggtgaggaggaaatcctgcccccgtgtaacttacaggtttttacctacacttgtgacgtggggaagagagagaatgtctacctgacagctgaaagggtccgcaaggaggttggcgaggtctcggtcctggtcaataatgctggtgtgggttctggacatcaccttctggaatgtcctgatgagctcattgaaagaaccatgatggtcaactgccacgcacacttctggaccactaaggcctttcttccaacgatgctagagattaatcatggccacattgtgacggtcgcgagctccctgggactgttcagcactgctggagttgaggattactgtgccagtaaatttggagttgtgggttttcacgagtctctgagccatgagctaaaggctgctgaaaaggatggaattaaaacaactctggtttgcccttaccttgtagacacgggcatgttcagaggctgccgaatcagaaaagaaattgagccctttttgccccccttgaagcctgattactgtgtgaagcaggctatgagggccatcctcactgaccagcccatggtctgcacgccccgcctcatgtacatcgtgacattcatgaagagcatccttccttttgaagccgtcgtgtgcatgtatcgatttctaggagcggacaagtgtatgtatccctttattgctcaaagaaaacaagccacaaacaacaatgaagcaaaaaatggaatctaagagtgtttttgtacggagtgccgtttctatcaggataggtggtccgtgcgcatcaatcagtactgacggtctggattctaaccccatgccgactctttttttttttttctaatcaactttttaaaaaataaagtgtaaattaactgactagtgtgcttgaaaactgtgagcttgggtttttgccaatggggtcttttctagacagggccctaaaaatgagtccaatatttagacaaacactatgttacatcattatttttttaatgaacataaagtctagaaatgatgactacagtgtgtttcacgtgggtccccacagaattgattcattcattatcgtggaagcccagccagcattcaaggaccgacagtgtagtgctctgttgtgttctcggttcttctcctgcaagcctgggtggcttgcttatggtgtctgtggattttttgatgtcagtttgagatcagcgtagtctgagcatcacaatgaaggccaccagtctctttcttaaacttacagtgactaaatattgggtgattttcaaattcagtctctgaaatactaaattaaatgtttagagacctggttaatccacgtttgtacattttctacctgtgaatcttgctgcatatagaaagtgccctttcctcacggagctgcaaacttgtgttaggggaggaagtgggggatcttgtctacaggacacagcagctccacagagataatgggaatttctgattaaaaagtccccgtacttgtgccaactttaattagcttggggagcaaatcttatatggagtgttgtggaagggtggaaagatttctttgaaaagtttattcacattgtagaacagcaaatgacatttttacagtatttttttgtaaagcaaactattttgtgccttgaatttggtatatgtgtattagtgaaacattgtaaaagtgaatttctacctctgtatctatgtgtaccatcctcttgtaaattactatgaactactatgtgattgcttctgtttgttcgttctaggatgtcttttttaaatagtgaccaatgtttaaggctgttaaaataagccaacttttacaaatcgggacgttttctaaagaactgattaaatacgtacataactgagtttgtggttattagctatcaacctcattataaggcaaagcattctgaggtcttcccctgcctatcttatcctgcttactcaaagaaaatgtttgaatggggtcataattagggtgggttttgcatactccaatctctagtctcaccatctgcctatagtaggttcttcaccaagagcttgtttagaaatgggaagagagaacaaccccactgcctgtattagtgtgggtgtctctgttactccactgcctgtattagggtgtgtgtctctgttaccccattgcctgtatcagtgtgggtgtctctgttactccactgtctgttttagtgtgggtgtctctgttaccccactgcctgtattagtgtggttgtctctgttattccactgcctgtattagtgtgggtgtctctgttaccccactgcctgtattagtgtgggtgtctctgttatcccactgcctgtattagtgtggttgtctctgttaccccactgcctgtattagtgtgggtgtctctgttatcccactgcctgtattagtgtgggtgtctctgttaccccactgcctgtattagtgtggttgtctctgttaccccactgcctgtattagtgtgggtgtctctgttatcccactgcctgtattagtgtgggcgtctcttactccactgcctgtattagtgtggttgtctctgttaccccactgcctgtattagtgtgggtgtctcttactccactgcctgtattagtgtgggtgtctctgttaccccactgcctgtattagtgtgggtgtctctgttcagggatctcacattctggaaggggcctggctcactgctgatctttattatgcgtttggacttctcattaggaatgacaaccaaccatgccttgaggcagtgtaagactgaatttaccacctgctgcttgattttcaattatgggtttaaataagcacttgaagtaatgttctaacaatgttgtgtaggtcagctattttcaagttatctaggtcttttcccacttaggctaggatatacaaaaccattctagagaaatctgttaatttaatagtctgtttcgtcagccttaaagccaacaagaatcctcattacatttaattttgttctcatgtgttggagtctaatctgtttctatttttgtttggtttggcccttataaaatggtccatctccaagttcaataaacctaatttgtttaaaaaaaaaaaaaaaaaaaaaa

SEQ ID NO: 610 - DNA, 1515 bp, Mouse
gctccgctggggtccgccggcagcggcggacggttggcccggtttgggccggttccagcctcctggaacaaccatgtcgccagttttgcgcgtgccaaattcacggcgctgcccaagcggagctgctatctgaattctccttggatgtggcaaagggaaatgaacgcaaaaggtgccgctggaagtgtccgacctagagaaatatgtagaccggagccctgttaccttcctccagcatggacttcctggttctcttcttgttctacttggccttcttattgatttgtgttgtcctgatctgcatcttcacaaaaagccagcgtttgaaggccgtggtccttggaggagcacagagcggagccgaggagatggctgggcagtcacagagctgccgtgcaaccagaactggagggatggcagagaagcaatccaagagaataaagcgtgtgctccagggtaatcccgcagtgcctccagagggccgtgcagacgcttcttcatcagctcttccacacacggaggaggttggcccgggccgtgttcctcggactcatgtggcttcttcctggaatggcccgtgcatactccctgtgtgcttccttgcagccaccccaccttcatcgtcttgcacctgctcttgcaagggctagtgtatgcagaatacacctgcgaggtcttcggctattgccgggagctggagttctctctgccttaccttctcctgccctatgtgctgctaagcgtgaacctggtgttcttcaccctgacttgtgccgccaatcctggtaccatcactaaagcaaacgaatcatttcttctgcaagtctataaattcgatgatgtgatgtttccaaagaactcgaggtgccccacttgcgatttaaggaaaccagcccgctccaagcactgcaggttgtgtgaccgctgtgtgcaccggttcgaccatcactgtgtttgggtgaacaactgcatcggggcctggaacaccaggtacttcctcatttacctcctgacgctgacggcttctgctgccaccatagccaccgtgactgctgcctttctgctccgcctagtgacagtgtctgatctctaccaggaaacttacctagatgacgtggggcatttccaggctgtggacactgtctttcttattcagcatctgttcctggcatttccaaggattgtcttcctactgggctttgtcatcgttttgagcatgctcctggctggctacttgtgctttgctctgtacctggctgccaccaaccagaccacaaatgaatggtataaaggcgactgggcctggtgccagcgctggcctctggtggcttggtccccatcagctgagccccggatccaccagaacattcactcccacgggtttaggagcaaccttcgagagatctttctacctgctacccccagttacaagaaaaaggagaaatagagcggaagtgccctgccttttaaatacagtgcacacctatttgtacacatgaaaaaaaaaaaaaaaaa

SEQ ID NO: 611 - DNA, 1817 bp, Mouse
ggggcgagctccgtgccctcctggccttcactcatctgagcagtgcccacttctggctcatgatgacgctgggtggcctgtttggctttgccatcggctatgtgacaggactgctgatcaaattcaccagtcccctgacccataacgtgtcaggcacggccaaggcctgtgcacagacagtgctggccgtgctctactacgaagagattaagagcttcctgtggtggacaagcaacctgatggtgctgggtggctcctccgcctacacctgggtcaggggctgggagatgcagaagacccaggaggaccccagctccaaagatggtgagaagagtgctatcagggtgtgagctccttcagggagccagggctgagctcgggtggggcctgcccagcacggaaggcttcccatagagcctactgggtatggccctgagcaataatgtttacatccttctcagaagaccatctaagaagagccaggttctttcctgataatgtcagaaagctgccaaatctcctgcctgccccatcttctagtcttgggaaagccctaccaggagtggcacccttcctgcctcctcctggggcctgtctacctccatatggtctctggggttggggccagctgcactctttgggcactggactgatgaagtgatgtcttactttctacacaagggagatgggttgtgaccctactatagctagttgaagggagctgtgtaaccccacatctctggggccctgggcaggtagcataatagctaggtgctattaacatcaataacacttcagactacctttggaggcagttgggagctgagccgagagagagagatggccattctgccctcttctgtgtggatgggtatgacagaccaactgtccatggggtgactgacacctccacacttcatattttcaactttagaaaagggggagccacacgttttacagattaagtggagtgatgaatgcctctacagcccctaaccccactttccctgcctggcttctcttggcccagaagggccaccatcctgttctccaacacctgacccagctatctggctatactctctttctgtactcccttccccttcccccccccattagcctcctccccaacacctccatcttcaggcaggaagtggggtccactcagcctctgttcccatctgcttggacccctgagcctctcatgaaggtaggcttatgttctctgaggctggggccggaggagcgcactgattctcggagttatcccatcaggctcctgtcacaaaatagcctaggccgtgtgtctaagaacagtggaggttggcttataactgttctgggggcagcgaagcccacatcaaggtactcatagacccagtatttctgaggaaacccctgtccacatcctcacttggtaaaggcacagataatctccctcaggcctcttgtataggagcactagccctgggagggctccgccccatgacctgatcaccccaaagccttcaacagaaggattccaacatgaatttggggacagaagcactcagaccacgatgcccagcaccacaccctcctatcctcagggtagctgtcactgtcctagtcccttctgtttggccttttgtaccctcatttccttggcgtcatgtttgatgtctttgtctctttcgtgagaagatggggaaaccatgtcagcctctgcttccgacttcccatgggttctaatgaagttggtggggcctgatgccctgagttgtatgtgatttaataaaaaaaaaatttttttaaaaacaaaaaaaaaaaaaaaaaaa

SEQ ID NO: 612 - DNA, 413 bp, Mouse
acaccatgaagatcccaattcttcccgtcgtggctctcctctctcttctggcattgcatgcggtccagggagcagccctggggcatcccacgatatacccggaagatagcagctacaataattaccctaccgcaacagaggcctttcagtcagaaaacttcctgaactggcacgtcatcactgatatgttcaaaaatgcatttcctttcattaactgggacttcttccctaaggtgaaaggactgagaagtgccgctcctgattcccagtgaccattctctttaagacctaggacctaggctgagcccagtagaagaggaggcaagcatggaatctgaagtccatcctacgacaaatcttccttgcctcagttcccccaataaagtgttttccactcaaaaaaaaaaaaaaaa

SEQ ID NO: 613 - DNA, 509 bp, Mouse
agtgaacaacttcattgttcctctcccatggtgagaagctagctttaggtgaagacttcctatagagcttcctaggtgaatcccagtgacctcctcccttggcttcaggccaagtgtccccttctatcactgtgcctgggacctctagggacacccacccgctcccccatgttgccttcagaccatcagcaacagagtcttgggagaacatgagactgcctatttttcacattattgcatttttttttttagttgtgagtatggggtgcacatgcgcacatggaggtcaaaggtcagacctgtgcacatgtggctacatggaggtcagagggcacgtaaggcggcttcttctattgttctccacctttaaaagaattgtcatagaggcagagggaggagggatgggatggggaggtttgcagaggggaaaccgggaagggggacaacatttgaaatgtaaataaataaaataaccaataaaaaattatcttcataaaaaaaaaaaaaaa

SEQ ID NO: 614 - DNA, 948 bp, Mouse
attttagatgtatttccggaagcatatttttcatagaatgtagcgtgtaaatagctttttaaatgacttcttttttacaagagcaaaagtatctctaggaatttctttctatagagtccttcattaacctttatacgagtttttgctcccccacccccttctctgatggatggtcgggttctggccccccacccccttttctttcctttccttttgttactccttcttattttcctcttaggaactaaggtattgcctgaaaaacaacggcgcctgcgcggccttacactccgcctctcagagcggacagtacagaggcccctcccactcgccccgaaagccgcgtctccagtctcacaccagctcttcggtcctcttccttgtatggcgagggtcagggatgcagttactttgctagcaccttgtgaagtatttgtgtttcgtgatgctgtaatttattaatgtttgtagctttttatatttgtacatttcttatgaggtttgtttctacacccgttacccggatgtgttgtccacgaggagatgcagcttggcggaggccttatccactcccacttgacctgtttggagggacgccatccccagggcccggggctgggagaggggcatcgtgcaggccccaggcttactcagaactggtgtttttaaaagttttccttgaccctgtccttgtgaacatttctataatcttaacccgggcatcaagctgttctctctctctctctctctctctttctctttttaattttattattattttggcgacatgtacatttctaacaaagtttatcgtggctattaaagtgttctatttcccagttcatattactcttgtatcgagtccatgaggtctaaggcaacttagaccaaagttttaaaaaagtaaaaatatttcaggttttgtccagaaaaaaaaaaaaaaaaaaa

SEQ ID NO: 615 - DNA, 505 bp, Mouse
tttttttttttttttacttccaatgctagctgtgatccctgtatatgtctcttgtttattcacttggttatgattcgtatttttgttctttttgttttttggtttttaatttataacagtcccactcacctctatttattcatttttttttctctttttttgggaaaacccgacctcttacatccccaagccatccctcctgcctctttgggaggcccactcctgggccttccctgcgccccagtatgtccgggcttggcccgtctgtctccgcccgcccgcggctccagccgggctctcatggtgctcaaacctgctcccctcccctacgtcctgcactttcttggaccagtacccccactcccgacccaaccccgaccccacctgagggtgagcgactcctgtactgtaggggaagaagtgggaactgaaatggtattttgtaaaaaaaataaataaataaaataaaaagttttaaagaacaaaaaaaaaaaaaaaaaaaaaa

SEQ ID NO: 616 - DNA, 1251 bp, Mouse
atgagctgggagctgctgttgtggctgctggcgctgtgcgcgctgatcctgccccttgtgcagctcttgcgctttttgcgggcggatgcggacctgaccttgttgtgggctgaatggcaagggcgacgcccagaatgggagctgactgacatggtggtgtgggttactggagcgtcaagtggcattggcgaggagctagctttccagttatctaaactcggggtctctctggtgctgtcagcccgaagggcgcaggagctggagcgggtgaagagaagatgcctggaaaatggcaatttaaaagaaaaagatatactggttctgccccttgacttgaccgatacaagttcccatgaggcagccaccaaagccgttctgcaggagtttggtaaaattgacattttggtcaacaacggtggaagaagccagcgttccttagttctagaaaccaacttggatgtcttcaaggagctgataaatctgaactacatagggacagtatccttgaccaagtgtgtcctgcctcacatgatagagaggaaacaagggaagattgtgactgtgaacagcatcgcggggattgcctctgtgtccctttccagtggctactgtgccagcaagcatgctcttcggggttttttcaatgccctccatagtgagctcggccaatatccaggcataacattttgcaacgtttacccggggcctgtgcagtccgacattgtgaagaatgccttcaccgaggaagtaactaagtctatgagaaacaacatagaccagagttacaagatgccaacgagccgctgtgtgcggctgatgttcatctccatggccaatgatctgaaggaagtctggatctctgaccatcctgtgctgttgggggcatacatatggcagtatatgccaacctgggccgcatggctaaactgcaagttggggaaggaaagaatccaaaactttaagaataatttggatccagacttgccttataaattcttgaaggcaaagaaggattgaaacaaccaccagagatgtctgagccacttgttgagaatgaaaaacagcgtatgtacagtaagcttgcacacagaaggagggccggtgactactttcaggtttaatttttgatacaactttctattcagtatgtaatgaataataaagaaaactttgtcctgtatcttgcctttgtacaagagcatatggtacctttttgaataaaataacatttaacataaaaaaaaaaaaaaa

SEQ ID NO: 617 - DNA, 502 bp, Mouse
ggatgatagcacatactgtgactacaagctcacctttatagtgcacatccatgggctaccgctcagcagcaagcagtcctccttcattgttatggtgtctaccagcttctttatagccctggttgtcttctacatcctgttctgcctcctgtggcctcgaatagtgaaggcctgggtctcatttcgctggaagattcacaacatgatggcaccagagacctattcatcttcctcctcttctgggggcttcaccctccattctcacagctcagagggaagttttgagggtccctccagaccaggtaccaaagaggacaatgttcaagctaagagagcaaaggtggcctgagtccctggtctgtactcttcctcatgaacccttaggcctctcctcatgggaatgcagcctgccacctccccaggactttctggttggctagaatgctcatgtctcattcagaccctaataaagcctccttgcagaatcaaaaaaaaaaaaaaa

SEQ ID NO: 618 - DNA, 528 bp, Human
tagcgtggtcgcggccgaggtactggccctcggtgctggcaaaggtgtagttccactggccgagggaatcaagacatagtggtccttctgctaagccaagggctgccacaatgacacagtagccagatcctgcaattccaatgagagcagccaatacagaagaaagcatcgcacatcgtttgccacagttttcatggccacagcagccacagcagtcatcctgttccagcccaatgaagacaaatgctggcaggagcatcagcaggccacctcctacgatgccagaaaagaaccacacgaagcggctgaggtggttttcggaggcatactttgtttccccattgggaaagtaaagcaaaatattagccgcgatgcacaggagggcgagccccaccagagaatgtccgatgcatcgtgcacacttcccatagcacatggtggtctgctaggttttctcccccttctctttgtcttcagctcagtgataccccaaattagatgaaagacctgcccgggcggccgctcgaa

SEQ ID NO: 619 - DNA, 2013 bp, Mouse
ggtatcacccaggcccacttatccatctacagcgagtagtatggcggccttccttgtaacaggctttttcttttctctcttcgtggtgcttgggatggaacccagggctttgtttaggcctgacaaggctctgcccctgagctgtgccaagcccacctccctctgtgtacaaagctcctttcttgggtgaccaacatcttcctgtctttgagcaaccaaggccagcatgcgagccacccagaagttaattaaaccaggttcatcgggagtttgctgaaatgttaagcatactctgttctagagagggagtgaagaaggggccatcttaaactcccgtgaggcccaggcctcgtgctcctgccccacctccatgtgcatcagactgggtgagaggtccttcacttgtcttgggataaattgtagttgtcttagtgagtgtgtatttccacagttttgcctcatgtcagtccccacgcggaaggatagccttctgtgttcttcttgcctttgttttgagacaggatgttactctgaaaccctggttggcctggaacctgataggtgaccaagccagcctcaaactcgtggcagccctcttgcatttgcctcctgaattggagctaggattcagcctgcaccaccacggctggcttgttttctcatctctaaaaacaaagtctaagctaaaagttgtttgcagtctaacaaaggggaatgagctttgtaaaaccagaggcccctcccgcccagacaaaatggcctttctcagtagtactccagagcctgctgtgactttgtgtactgtgctacatttttttttagtgatctttttaaaaacatgttcaagaaatgctctttcttaaagtcgtctcactccacagttcgctgctttaaagtggccatgctttcccctacgctgtgctgacacttaaaataaatgccagctttatggaaccattctgactcatggcagctccctttgaaaacttaccaatacttcacctagcacgggggtcagggagagcttgacagtggtccccgtggctcagggagatgccgtggccacagctttcaccccattgctaatcagggtgtgagcaccctttatatgcaaactgggtggtggtctgtctggttccagtgggaggtaccatctcttctcctttgagaaatgcccctgcagtgtctccgtgggtggggtggggttgagctttgacgattccagagaagaggtctctgttcttctgtgaggggccaagcgagggctcctgggtcagagctgtactcacagcagagggtgtgcagacaggccttagtgggtgtgaggtgcccacgattgggtgtttattctctttggcttcctaaattgcctcttggttgctcttgccgtctctggatatccaaggaaagtctgtctaggttttggcaagggtagaattgttttcctttatagagagacacagttttgtcaaggaagtgaaaacggattcgagattggcagatggacagaagctttaaaaaggaagagcccacagcaagcactctgaccctgagccgagatcatggcttacagtcttgaaatgtgaactgtgatgtctccatgcggctgatgcaggccatgggccgacatctacagagtggctcctccctcgctcttgcttagcctccgatctgtataagccctccaccttggagccgggattttgagtggagtctgcctattttccagtggatactaagaaactattaaacagtgggaagcctggctgttttaagtaccgtcgcttcctttttgatatagatacagactttgaatacaatgcagtttcctcagtaacattagctttcgtagcagtttataccataagatgttctgactggtttgtacactaggtgggtcagctagtagaatttaggcatttatacttttcctgagttatactcccagaacctcctcagagttgcatgtagatagcatttatttctgcatatttaaaaaaaaaaaaaaaaaaa

SEQ ID NO: 620 - DNA, 1002 bp, Mouse
actagtggatccaaagaattcggcacgaggtgaggcttgaggggcttgagggtccctggcagcacggggcatcctgaccagctaggaaagcctctcagggagtaccagaggccacagctgaagaatcaactcttccctgagtcagctctttgagcctagagccaaagggttggcttttgcttcccagaggaccaggcatcatttgtgaagacctgcaggagctacttgtccacctgggccagtaagatccccatcctggtgctgagaggaggatgtcttcctgggacgcttgctgatgctacctgaggcctagtgcttctgcacagggccagcttgccctcctccctgccagggcggggaaggatcccttctgttccttgtggactccgagctactgcagacccaggccacagccatacccatctgtaccagcactgtgaccatccatcttccttccttggtgcaccagctccagcctcaggacttcctcctcctggccctgacagcccagctcttgtcccagcagaatccagtgacaggaaggagtttctgaggcaggggaggaggcttctccatgggaaccagacagccttgcttcactgtataagtgccctgatcacacgcagaatgaagtgccaggttgctcagaagcacaaagggtgtggctactggccctaaccatggactacgtggttctaaccaaagactctagaactctggggtgggggagaaacaatgtgttctgtgctccagaacctcggcttcctggcccatatggatgggcttggcaaggaacctacctcttctctaaggtgaagccctaaggtctgccaaggctgacacgtcttccttttctactgacagactttatatatatatatttatatacgtggtagttacctggggtggtggtgtcagggaattgaggcaaaatgactttactgtacctccggcctacagtggcaccccaataaacaggacaaaatcaaaaaaaaaaaaaaa

SEQ ID NO: 621 - DNA, 1843 bp, Mouse
ctgccagctgccccttcgagtgcttatcatcagcaacaacaagttaggagccctgcctccagacatcagcaccttgggaagcctgcggcagcttgatgtgagcagcaatgagctgcagtccctgcccgtggagctgtgtagcctccgttccctgcgggatctcaatgttcgaaggaaccagctcagtaccctgcctgatgagctgggagaccttcctctggtccgcctggatttctcctgtaaccgcatctcccgaatccccgtctccttctgccgcctcaggcacctgcaggtcgttctgctggatagcaaccccctacagagtccacctgcccagatatgcctgaaggggaaacttcacatcttcaagtacctaacaatggaagctggccggaggggagccgccctcggggacctggtcccttcccgccccccaagttttagtccttgccctgccgaagatttatttccgggacgtcgttatgatggtggcctggactcaggcttccacagcgttgacagtggcagcaagaggtggtcaggaaatgagtccacagatgatttttcagagctgtctttccggatctcggagctggctcgtgatccccgggggcctagacaacctagggaagatggcgctggcgatggagacctggagcagattgactttattgacagccacgttcctggggaagatgaagatcgaagtgcagctgaggagcagctgccttctgaattaagccttgtagcaggggatgtggagaagccatctagcagcaggcgagaggagcctgcaggggaggagaggcggcgcccagacactttgcagttgtggcaggaacgggagcggaagcaacagcaacagagtgggggatgggggtcccccaggaaggacagcgtcctgaagcgggggatccgagctgccggggcaggtgcttcggccccatccacacaggccacctgcaatggcccacctcccaggacccccttcctgtatctggaccaggtccttcctctccagagtctgttttgagacctcggccgtttcctcaggagaaggagctaatatcccaacttcgccaggtcctagagtcgcggctgcagcagcccctacctgaggacctggcagaagctctcgccaacggagtcctcctttgccagctggcgaaccagctgcggccccgctctgtacccttcattcatgtgccctcacctgctgtgccaaagctcagtgctctcaagtctcggaagaatgtcgagagtttcctagaagcctgtcggaaaatgggtgtgcctgaggctgacctgtgctcgccctcggatctcctccggggcaccgcccaggggctgcagaccgtcctggaggctgtgatcctggttgggggcaaggcccctctcccagtccagccctcctctggtctgggtggcttcctcctcttctacgtggtcttcatgctgctgctctatgtcgtctacactcggctcctgggctcctaggacccacgttgccccttccttccccaccttctatttataagacctcctgttcaaccggtggtgccttcagccctaccaaagacactagtgtccttcacgcacttctggaacagccttaggggtagaggttgggggctctgggccccaactaccatcggacctgtcctgggagcagatgacacctgggcccagccaattaacaaggacttggtgaccatggtcttgtgtgtagcactggccttggatatccccctgcccttaggctgcttcgggtacagcccccatctgggtgaagagcgttgtgtcaaacacaataaaaagaagcccaaagaaaaaaaaaaaaaaa

SEQ ID NO: 622 - DNA, 2368 bp, Mouse
gcccgcagcccggggtcgcgccccgccctgagtcccacagtcatgctgccccgaggtcgcccccgggcaatgggggccgccgtgctgctgctgctgctgttgctagtggttggcttcttcctgttcggccgggacccggattatggactgggcacaactgctaccctcgatgaagacccgtacaggagtcgcaacctctccgcctccagcccgcagcttctactgccacccaagtgcgagatgttgcatgtggctatcgtgtgtgcgggatacaactccagccgagagattattaccctaacgaagtccctgctattctacaggaaaaatccgctgcacctccacctgataactgatgccgtagccagaaacatcctggagacactcttccgaacatggatggtgccagcggtggtggtcagcttctatgatgcggaagaactcaagcccctggtctcctggatccccaacaaacactactctggcctctatgggctaatgaagctagtacttcccagcatcctgcctcccagcctggcccgagtcatcgtcctggataccgacgtcactttctcctctgacattgtggagctctgggcactctttgatcatttttctgacaagcaggtggtcggtctcgtggagaaccagagcgactggtacctgggcaacctctggaagaaccataggccctggcctgccttgggcaggggatttaacacaggtgtgatcctgctgtggctggacaggctccagcaaactggctgggagcagatgtggaaggtgacagccaaacgagagctgctcactctgatggctacttccttggctgaccaggacatcttcaatgcggtcatcaaggagcacccccatctggtgcaccccctgccctgtgtctggaacgtgcagctgtcagaccacactcgggctgagcgctgctacctggaagcagctgacctcaaagtgatccactggaattcaccaaagaagcttcgagtgaagaacaagcacgcagaattcttccgtaatctgcacttgacctttctggggtatgatgggaagctactgcgaagagagctctttggatgccccaaccagttccctcctggggccgagcagttgcaacaggccctaacacagctggatgaggaagagccctgctttgagttccgccaacagcagctcactgtgcaccgggtgcacatcaccttcctgccccaccagccgccacctccccagcctcacgatgtcaccttggtggcccaactctctatggaccggctgcagatgctggaagccctgtgcaggcactggccaggccccatgagcctggccttgtacctgacagatgaagaggctcaacaatttcttcattttgtggaaacgtcgccagtgctctctatgaggaaggatgtggcctaccatgtagtgtaccgggacggtccactctatccagtcaaccagctccgcaacgtggccttggcccaggctctcacaccctacgtcttcctcagtgatattgacttcttacctgcctactccctctacgactacctcagggcttctatcgagcagctggagctggacagtcggcgcaagactgctttggtggtgcctgcatttgagaccctacactaccggttcagcttcccaaactctaaggcagagctgttgacgttactggatgccggctcccttcacacctttaggtaccacgagtggccacagggtcactcatccacagactattcccgctggcgggaagcccaggcaccatacagtgtgcagtggtcagctgactatgaaccctacgtggtggtaccccgtgactgcccccgttatgatcctcgctttgtgggatttggctggaacaaggtggcccacatcatagagttggatgctcaggaatatgaattcctggtacttcctgaggccttctctatccacttgccccacgctccaagtcttgacatctcccgcttccgctccagccccacctaccgcaactgtctccaggccctcaaggaagagttccaccaggacttgtcaaggcgctatgggtctgcagccctgaaatacctcactgccctgcagcaggcccgaagtcgggcctgagcttaccccgctgccctagctatggcttacacattccctgtagaggctgaccagggtgtccacccttactgctatttaagttatttaaaatttttgtcagaaggggcagagtggagcatttgtggggttcctggttccttctgctgatccacactgggatccagccctcctttgcctcagctggtttggggctagtctaattctcttatataataaaaattttcaattttttttaaaaaaaaaaaaaaaaaaa

SEQ ID NO: 623 - DNA, 2275 bp, Mouse
ttttttttttttttttcttaaaagatttatttatttgttatatgtaaatacactgtagctgtcttcagagaccccagaagagggcatcagatctcattacagatggttgtgagccaccatgtggttgctggaatttgaactcaggaccttcagaagagcagtcagtgctcttaaccctgagccatttctctagccccgctgcccttctctgtatctcaatacaccttgctgcttcagacagcggatgctgaaggatgcttgggaagacagatctcctttagcagccaggctggcaagacgatgcgagctgcaaggaaagaggctccattcctagctggcacagttacgtacgtttgtaatcctggctgtttaggaggctgagggagaagaaggatttaagaccatgaattccacatcagtatgaccaggcctggtggcacagtcctaaatatttgggaggctgaagcaggaggatcctaagttcaaagactggctgggttgtacagtgagtttcaagcctacttgagtaacttaagaccttgtgttatgagaaaacagacatccgggaagatagttcagtggtagagtgcttgcctactgcacatgaggtcctcggttcaattctcagtgtctcaagttaccagcaaaatgaacaaataacaccactaccaaaccaaagccccaagcccagcctgaagagtcacagtaatgacagaaggacagaaccaggcaaactatgccagagactagccacccctaaagagctaatcccagacttctgcaagcccacgcctccaaccaaccacagaagaacatacactcaactgagcccttaccatggcagcacacagtggaaagctatggagatcgtgcaggacataggatgtgcccgagcacacaagtacctaggatgggtcacagacagctagttggctctgcctgctcaggtccctaaaagacaagttcttaagttgggccatattttcaagttctgtttgcatcaatccctcttctgataaaagacaacctagtctagaatgacactgtgctgtcactggaaacaagtacagactatacagtgtggctatacagtgtgggagcagctgccctaggcacatgggacgtgcgcatgcacatgcatgtacatgcgtgtaccatgtgtcagtcctgcccctcatcctgtcctctctccaccttctcaacactggactactagccatctcctctacatgctagtttatataaaaaccctccccattgagagttggtgcagaaactataggctgctgagttaaactgaattttgagtcacaaggaagacggttctagtttgaccacccctctaatgttacacaggatagctgtttttagttgttcaatctaacactctgccgtattccccgagtctccttcagacctgtccctgactcccacttctctccaggcatcgtggagttccaccaatggacagcagaggaccctgattgctcctgaactggctgtcctaataccagcagagactcgcccagggagccatgaggggaccccagtcaagcaccatgtcatcagctgctgagggtctcaatctatgcttgggtcccatgggagcaggcattgaggtcttttgcctgagagcatgctggaaaacaatggctctgtgagccagtcagttatctaaatctgcgcctcagctcttcctgcccctggctgtgccacactctcggggtgtcagaatctgcagtgatcaatgagctgaatgaccaggtccaaacacctgagtctactccgtgctccagcactgtgaggagcagagccagcatagactgtgtttggctgcgctccacactgcctacgtgacctacccccatcagcttttgtgtggaacgtccatctaacagcaacggtgctggccaaaccgggctgctgagggttcaacttaatttccagtgacttggaatagtgacgctatacgtctgttgggacaggccctgcctccgccctgggcattctcacctgggtttgggttcagtccaagcacagcaaagccagctttaatgggagacaggacacggcacatgtctgtagtccaaactacccaggaggctgacccagaaggatcatttgactccactgagttcaagacccacagagacaacatggaaaaaaccagacaacagtgatgataaaccataaaaaagacgagttctgtcaccatgggttccaatctattgccatcactcctttatccccaggacaggttttcacagagactatt

SEQ ID NO: 624 - protein, 688 aa, Rat
GAPMYFSEGRERGKVYVYNLRQNRFVFNGTLKDSHSYQNARFGSCIASVQDLNQDSYNDVVVGAPLEDSHRGAIYIFHGFQTNILKKPVQRISASELAPGLQHFGCSIHGQLDLNEDGLVDLAVGALGNAVVLWARPVVQINASLHFEPSKINIFHKDCKRNGRDATCLAAFLCFGPIFLAPHFHTATVGIRYNATMDERRYMPRAHLDEGADQFTNRAVLLSSGQEHCQRINFHVLDTADYVKPVAFSVEYSLEDPDHGPMLDNGWPTTLRVSVPFWNGCNEDEHCVPDLVLDARSDLPTAMEYCQQVLRRPAQDCSSYTLSFDTTVFIIESTRRRVAVEATLENRGENAYSAVLNISQSENLQFASLIQKDDSDNSIECVNEERRLHKKVCNVSYPFFRAKAKVAFRLDFEFSKSVFLHHLQIHLGAGSDSHEQDSTADDNTALLRFHLKYEADVLFTRSSSLSHFEVKANSSLESYDGIGPPFNCVFKVQNLGFFPIHGVMMKITVPIATRGGNRLLMLKDFFTDQVNTSCNIWGNSTEYRSTPTEEDLSHAPQRNHSNSDVVSIICNVRLAPNQETSFYLVGNLWLMSLKALKYRSMKITVNAALQRQFHSPFIFREEDPSRQVTFEISKQEDWQVPIWIIVGSSLGGLLLLALLVLALWKLGFFKSAKRKREPSLGPVPKELE

SEQ ID NO: 625 - protein, 242 aa, Rat; identical to SEQ ID NO: 502

SEQ ID NO: 626 - protein, 576 aa, Rat
MPFRLLIPLGLVCVLLPLHHGAPGPEGTAPDPAHYRERVKAMFYHAYDSYLENAFPYDELRPLTCDGHDTWGSFSLTLIDALDTLLILGNTSEFQRVVEVLQDNVDFDIDVNASVFETNIRVVGGLLSAHLLSKKAGVEVEAGWPCSGPLLRMAEEAARKLLPAFQTPTGMPYGTVNLLHGVNPGETPVTCTAGIGTFIVEFATLSSLTGDPVFEDVARVALMRLWESRSDIGLVGNHIDVLTGKWVAQDAGIGAGVDSYFEYLVKGAILLQDKKLMAMFLEYNKAIRNYTHFDDWYLWVQMYKGTVSMPVFQSLEAYWPGLQSLIGDIDNAMRTFLNYYTVWKQFGGLPEFYNIPQGYTVEKREGYPLRPELIESAMYLYRATGDPTLLELGRDAVESIEKISKVECGFATIKDLRDHKLDNRMESFFLAETVKYLYLLFHPNNFIHNNGSTFDSVMTPHGECILGAGGYIFNTEAHPIDPAALHCCRRLKEEQWEVEDLIKEFYSLRQSRSRAQRKTVSSGPWEPPAGPGTLSSPENQPREKQPARQRAPLLSCPSQPFTSKLALLGQVFLDSS

SEQ ID NO: 627 - protein, 226 aa, Rat
RKIKNKISAQESRRKKKEYVECLEKKVETYTSENNELWKKVETLETANRTLLQQLQKLQTLVTSKISRPYKMAATQTGTCLMVAALCFVLVLGSLAPCLPAFSSGSKTVKEDPVAADSVYAASQMPSRSLLFYDDGAGSWEDGHRGALLPVEPPEGWELKPGGPAEPRPQDHLRHDHADSIHETTKYLRETWPEDTEDNGASPNFSHPKEWFHDRDLGPNTTIKLS

SEQ ID NO: 628 - protein, 82 aa, Rat
PITLSCQSGNAASLQPLHFPPVPPEACPCAFRLRPFCLHTGCAGCSLRAATEQCAVALAPQLPSASRAFPPLTLCNPCVLTR

SEQ ID NO: 629 - protein, 242 aa, Rat
MAGAGPVLSILGLLLVSALFGVLGERPNPDLGAHPERRSQVGPGATEPRRQPPPKDQRERARAGSLSLGALYTAAIVAFVLFKCLQQGPDEAAVPREEKNKKKSSQSEQQLVQLTQQLAQTEEHLNNLMTQLDPLFERVTTLVGTQRELLNAKLKTIHHLLQDCKPGIGVEAPEPEAPIHFPEDLGKEDQEDAGNSQAWEEPINWSSETWNLAPSWEVEQGLRRRWHKTKGPAVNGGQALKV

SEQ ID NO: 630 - protein, 289 aa, Rat
MIVLLYVTSLAICASGQPRGNQAKGESYSPRYICSIPGLPGPPGPPGANGSPGPHGRIGLPGRDGRDGRKGEKGEKGTAGLKGKTGPLGLAGEKGDQGETGKKGPIGPEGEKGEVGPAGPPGPKGDRGDQGDPGLPGVCRCGSIVLKSAFSVGITTSYPEERLPIIFNKVLFNEGEHYNPATGKFICAFPGIYYFSYDITLANKHLAIGLVHNGQYRIRTFDANTGNHDVASGSTVIYLQPEDEVWLEIFFNDQNGLFSDPGWADSLFSGFLLYVDTDYLDSISEDDEL

SEQ ID NO: 631 - protein, 213 aa, Rat
MVLGGCPVSYLLLCGQAALLLGNLLLLHCVSRSHSFNATAELDLTPSGAAHLEGPAASSWEYSDPNSPVILCSYLPDEFVDCDAPVDHVGNATAYQELGYGCLKFGGQAYSDVEHTAVQCRALEGIECASPRTFLRKNKPCIKYTGHYFITTLLYSFFLGCFGVDRFCLGHTGTAVGKLLTLGGLGIWWFVDLILLITGGLMPSDGSNWCTVY

SEQ ID NO: 632 - protein, 167 aa, Rat
MASPRTITIVALSVALGLFFVFMGTIKLTPRLSKDAYSEMKRAYKSYVRALPLLKKMGINSILLRKSIGALEVACGIVMTLVPGRPKDVANFFLLLLVLAVLFFHQLVGDPLKRYAHALVFGILLTCRLLIARKPEDRSFEKKALPESAEEQPSLYEKAPQGKVKVS

SEQ ID NO: 633 - protein, 138 aa, Rat
FIRGMLKLILLLLFSGATLSSTWFTLTCLNSVTHLPLTTVTLYASCILLGVFLNSSVPIFFELFVETVYPVPEGITCGVVTFLSNMFMGVLLFFVTFYHTELSWFNWCLPGSCLLSLLLILCFRESYDRLYLDVVVSV

SEQ ID NO: 634 - protein, 75 aa, Rat
MIGDILLFGTLLMNAGAVLNFKLKKKDTQGFGEESREPSTGDNIREFLLSLRYFRIFIALWNVFMMLCMIVLFGS

SEQ ID NO: 635 - protein, 186 aa, Rat
MVAAVATAWLLLWAAACTQSEQDFYDFKAVNIRGKLVSLEKYRGSVSLVVNVASECGFTDQNYRALQQLQRDLGPYHFNVLAFPCNQFGQQEPDSNREIENFARRTYSVSFPMFSKIAVTGTGAHPAFKYLTQTSGKEPTWNFWKYLVAPDGKVVGAWDPTVPVEEIKPRITEQVMKLILQKREDL

SEQ ID NO: 636 - protein, 930 aa, Rat
MPSLLSLVLTFLAVSSPSCCQNSDTASPKASNGASFLWNNMRLPEYITPIHYDLMIHANLSTLTFWGKTEVEITVSQPTSTIIMHSHQLQISKATLRRGAEEMLPEEPLKLMEYSAHEQVALLTAQPLLAGSVYTVIITYAANLSENFHGFYKSTYRTQEGERRILAATQFEPTAARMAFPCFDEPALKASFSIKIKRDPRHLAISNMPLVKSVTVAEGLIEDHFDITVKMSTYLVAFIISDFKSVSKMTKSGVKVSVYAVPDKINQADYALDAAVTLLEFYEDYFSIPYPLPKQDLAAIPDFQSGAMENWGLTTYRESALLYDKEKSSASSKLGITMTVSHELAHQWFGNLVTMEWWNDLWLNEGFAKFMEFVSVTVTHPELKVEEYFFGKCVNAMEVDALNSSHPVSTPVENPAQIREMFDEVSYEKGACILNMLRDYLSADTFKRGIVQYLQKYSYKNTKNEDLWNSMMHICPTDGTQTMDGFCSRNQHSSSTSHWRQEVIDIKSMMNTWTLQKGFPLITITVRGRNVHLKQEHYMKGSECFPETGSLWHVPLTFITSKSDSVQRFLLKTKTDVIILPEAVEWIKFNVGMNGYYIVHYGDDGWASLNGLLKEAHTTISSNDRASLINNAFQLVSIGKLSIEKALDLILYLKNETEIMPIFQGLNELIPMYKLMEKRDMVEVETQFKDFLLRLLKDLINKQTWTDEGSVSERMLRSQLLLLACVHRYQLCVQRAERYFREWKASNGNMSLPIDVTLAVFAVGAQNTEGWDFLYSKYQSSLSSTEKSQIEFSLCISQDPEKLQWLLDQSFKGEIIKTQEFPHILTLIGRNPVGYPLAWKFLKENWNKIVQKFELGSSSIAHMVMGTTNQFSTRARLEEVKGFFSSLKKNGSQLRCVQQTIETIEENIRWMDKNFDKIRLWLQKERQELL

SEQ ID NO: 637 - protein, 161 aa, Rat
MAYHSGYGVHAMAFITYVLLAGMALGIQQRFSPEVLGLCASTALVWVLMEVLALLLGLYLATVRSELGTFHLLAYSGYKYVGMILSVLTGLLFGSDGYYVALAWTSSALMYFTVRSLRTAASGPDSMGGPTPRQHLQLYLTLGAAAFQPLIIYWLTFHLVR

SEQ ID NO: 638 - protein, 165 aa, Rat
MARAAGITAAITLALLGVLALGAGDGDFRLDDALEDTDKKPTPKPPTPKKPSSGDFDLEEALTGGADEDPRRPGSRPKPDPKPPGPPRDSGGISDRDLEDVAGHGGRGGGAGDRGTDGAESEGQPQGLIPGVVAAVLAALAGAVSSFVAYQKRRLCFREGGSAPV

SEQ ID NO: 639 - protein, 61 aa, Rat
MHIYKYVHINYYLHLHICIYVYTHISVGMCIRICLPSSSHWKKESIRSGGSKNAHYPGSGI

SEQ ID NO: 640 - protein, 73 aa, Rat
MCFSLCSVEVFFLKQNSNLLPAHIFIRASPICIIGNEYEYIFMYVCNHRSHLYLGFAAADYFFPHHGTGNCFQ

SEQ ID NO: 641 - protein, 442 aa, Rat
MPVLWLLLLLPLLPLLAMLCQQRSPGARPCWLISLQHRVACVVLSWAAAWQRRKLEQSTLNVSQSQQQALMGCLKEAQGSCCLPRENTDMTTFRNLPLTKTSHTQQKESEEKLLPPTLPQYHGDASLQVTLLGLMTLNKAYPEVLAPGSTACVTPTSPWPYSVPWLGHALGRVSPIGAKDARTLLLEALISPGLRVLEARTAVELLDVFVGLEADGEELAEVIASGSLGKLPRRAAELQEALEQGPRGLALRLWPKLQVVVTLDAGGQAEAVAALRVLWCQGLAFFSPAYAASGGVMAINLWPEQPQGSYLLSPGVPFIELLPIKEGTQEEAASTLLLTDVRREEKYELVLTDSTSLTRCRLGDVVQVIGTYNQCPVVRFTCRLGQTLSVRGEVTDENVFSVALAQAVGQCQGPSCWTMSVWRATFWTPMRDPPHTTKCLWS

SEQ ID NO: 642 - protein, 65 aa, Rat
MTVCTLLVAKSTLLLSLSCLLLCSLFLYSVSGSYSRCPVRWLVCLSSQLPWATSQSLLKRKLSMN

SEQ ID NO: 643 - protein, 197 aa, Rat
PRPGRARTLRSPSGSRVVQRPRNDGVAALTGAGGCRAPRAGMAGQFRSYVWDPLLILSQIVLMQTVYYGSLGLWLALVDALVRSNPSLDQMFDAEILGFSTPPGRLSMMSFVLNALTCALGLLYFIRRGKQCLDFTVTVHFFHLLGCWLYSSRFPSALTWWLVQAVCIALMAVIGEYLCMRTELKEIPLSSAPKSNV

SEQ ID NO: 644 - protein, 930 aa, Rat
MPSLLSLVLTFLAVSSPSCCQNSDTASPKASNGASFLWNNMRLPEYITPIHYDLMIHANLSTLTFWGKTEVEITVSQPTSTIIMHSHQLQISKATLRRGAEEMLPEEPLKLMEYSAHEQVALLTAQPLLAGSVYTVIITYAANLSENFHGFYKSTYRTQEGERRILAATQFEPTAARMAFPCFDEPALKASFSIKIKRDPRHLAISNMPLVKSVTVAEGLIEDHFDITVKMSTYLVAFIISDFKSVSKMTKSGVKVSVYAVPDKINQADYALDAAVTLLEFYEDYFSIPYPLPKQDLAAIPDFQSGAMENWGLTTYRESALLYDKEKSSASSKLGITMTVSHELAHQWFGNLVTMEWWNDLWLNEGFAKFMEFVSVTVTHPELKVEEYFFGKCFNAMEVDALNSSHPVSTPVENPAQIREMFDEVSYEKGACILNMLRDYLSADTFKRGIVQYRQKYSYKNTKNEDLWNSMMHICPTDGTQTMDGFCSRNQHSSSTSHWRQEVIDIKSMMNTWTLQKGFPLITITVRGRNVHLKQEHYMKGSECFPETGSLWHVPLTFITSKSDSVQRFLLKTKTDVIILPEAVEWIKFNVGMNGYYIVHYGDDGWASLNGLLKEAHTTISSNDRASLINNAFQLVSIGKLSIEKALDLILYLKNETEIMPIFQGLNELIPMYKLMEKRDMVEVETQFKDFLLRLLKDLINKQTWTDEGSVSERMLRSQLLLLACVHRYQLCVQRAERYFREWKASNGNMSLPIDVTLAVFAVGAQNTEGWDFLYSKYQSSLSSTEKSQIEFSLCISQDPEKLQWLLDQSFKGEIIKTQEFPHILTLIGRNPVGYPLAWKFLKENWNKIVQKFELGSSSIAHMVMGTTNQFSTKARLEKVKGFFSSLKKNGFQLRCVQQTIETIEKNIRWMDKNFDKIRLWLQKKRQELL

SEQ ID NO: 645 - protein, 179 aa, Rat
MLHNVSKGVVYSATVVLGLLAYVAFKCWRSRKQRQQLAKARTVELGDPDRDQRHGDSSIFVDSPHGLEPCIPSQGPHADLGCRLYLHIPQQQQEEVQRLLILGEPAKGWQGLAGQLGYQAEAVETMACDQDPAYALLRDWAAQEGSGATLRVLEDALTAIGREDVVQVLSSPAEGCSVV

SEQ ID NO: 646 - protein, 298 aa, Rat
MKYLLDLILLLPLLIVFCIESFIKRLIPKKKKSVAGEIVLITGAGHGIGRLTAYEFAKLNTKLVLWDINKNGIEETAAKCRKLGAQVHPFVVDCSQREEIYSAVRKVKEEVGDVSILVNNAGVVYTADLFATQDPQIEKTFEVNVLAHFWTTKAFLPAMMKNNHGHVVTVASAAGHTVVPFLLAYCSSKFAAVGFHRALTDELAALGCTGVRTSCLCPNFINTGFIKNPSTNLGPTLEPEEVVEHLMHGILTNQKMIFVPGSIALLTVLERVFPERFLDVLKHRINVKFDAVVGYKDK

SEQ ID NO: 647 - protein, 59 aa, Rat
MNSVPTQLILVLTSLLLILPGVEAVEAGDAIALLLGVVLSVTGICACLGIYARKRNGQI

SEQ ID NO: 648 - protein, 281 aa, Rat
VLSTAPPTMRPAPQPQDCPASICLNGGSCRVGAKHHLECLCPEGFIGLYCESPVEQRTKPSSIPDTPRPPRLLPLRIEPVSPTSLRVELQRYLQGNTVQLRSLRLTYRNLSGPDKRLVTLRLPASLAEYTVTQLRPNATYSICVTALGAGRTPEGEEACGEANTPQAVRSNHAPVTQAREGNLPLLIAPALAAVLLAVLAASGAVYCVRRARASSTAQDKGQVGPGTGPLELEGVKVPLEPGSKASEGGGEALSGGPECEVPLMGYPGPSLQGVLPAQPYI

SEQ ID NO: 649 - protein, 88 aa, Rat
LGSVSVTTIEPCVQVGSPARHSLHPPLCISIGATVPYFAEGSGGPVPTTSALILPPEYSSWGYPYEAPPSYEQSCGAGGTDVGLIPGS

SEQ ID NO: 650 - protein, 290 aa, Rat
EVDPDLKCALCHKVLEDPLTTPCGHVFCAGCVLPWVVQEGSCPSRCRGRLSAKELNHVLPLKRLILKLDIKCAHAARGCGRVVKLQDLPEHLERCDFAPARCRHAGCGQLLLRRDVEAHMRDACDARPVGRCQEGCGLPLTHGEQRAGGHCCARALRAHNGALQARLGALHKALKKEALRAGKREKSLVAQLAAAQLELQMTALRYQKKFTEYSARLDSLSRCVAAPPGGKGEETKSVTLVLHRDSGSLGFNIIGGRPCVDNQDGSSSEGIFVSKIVDSGPAAKKRPANS

SEQ ID NO: 651 - protein, 202 aa, Rat
MARPRPREYKAGDLVFAKMKGYPHWPARIDELPEGAVKPPANKYPIFFFGTHETAFLGPKDLFPYKEYKDKFGKSNKRKGFNEGLWEIENNPGVKFTGYQTIQQQSSSETEGEGGNTADASSEEEGDRVEDGKGKRKNEKGGSKRKKSYTSKKSSKQSRKSPGDEDDKDCKEEENKSSSEGGDAGNDTRNTTSDLQKAGEGT

SEQ ID NO: 652 - protein, 79 aa, Rat
MPVAVGPYGQSQPSCFDRVKMGFVMGCAVGMAAGALFGTFSCLRIGMRGRELMGGIGKTMMQSGGTFGTFMAIGMGIRC

SEQ ID NO: 653 - protein, 555 aa, Rat
MPVNLGQALGLLPFLAKAEDATFSGSDVIQQRELANPETARQLFRQFRYQVMSGPQETLRQLRKLCFQWLRPEVHTKEQILEILMLEQFLTILPGEIQMWVRKQCPGSGEEAVTLVESLKGDPQKLWQWISIQVLGQEIPFEKENSARCRGDKVEPALEAEPTVEVVPQDLPLQNTSSAPGELLSHGVKEESDMEPELALAASQLPARSEERPTRDQEVGTALLPSLQEEQWRHLDSTQKEQYWDLMLETYGKMVSGAGISNSKPDLTNMAEYGEELVGLHLHSAEKMARAPCKEDRQENDKENLNLENHRDQGCLDVFDQAPGEAPPQTALSDFFGESEPHHFGGESVPEALENLQGEGTGAHLFPHERGSGKQLGQHIQSSSSGELSALWLEEKREASQKGQARAPMAQKLPTCRECGKTFYRNSQLVFHQRTHTGETYFHCRICKKAFLRSSDFVKHQRTHTGEKPCKCDYCGKGFSDFSGLRHHEKIHTGEKPYKCPICEKSFIQRSNFNRHQRVHTGEKPYKCTHCGKRFSWSSSLDKHQRSHLGKKPCP

SEQ ID NO: 654 - protein, 244 aa, Rat
LAYYNPFYFLSAAAPGPGAATSAGATPTAVAGLTARAPHVQASARAVPVTRVGSAAPARTASDTGRQAGREYVIPSLAHRFMAEMVDFFILFFIKATIVLSIMHLSGIKDISKFAMHYIIEEIDEDTSMEDLQKMMIVALIYRLLVCFYEIICIWGAGGATPGKFLLGLRVVTCDTSVLIAPSRVLVIPSSNVSITTSTIRALIKNFSIASFFPAFITLLFFQHNRTAYDIVAGTIVVKRNGVR

SEQ ID NO: 655 - protein, 265 aa, Rat
MGLLFLVLLSPLSCVLGLPFYNGFYYSNGLHGRTLGNGYGEGLFNGVKLVVETTEESLFSHQGASVTLPCHYHYEPALASPRHVRIKWWKLSENGTPEQDVLVAIGQRHRSFGDYQGRVQLRQDKEQEVSLELRDLRLEDSGRYRCEVIDGLEDESGLVELELRGVVFPYQPREGRYQLNFHEAQQVCQEQDAVVATFEQLFRAWEEGLDWCNAGWLQDASSCRFGTSSCRIRHEACRRPLWCGDPRVNPPTPCLTRRQNLQLRT

SEQ ID NO: 656 - protein, 343 aa, Rat
MAVCPYGAAAVVMALLSAAIAFHWSPLLAVLQRALSLHTAHATKDMDNLFQLVRNIVPALTSKKHKGQDGRIGIVGGCQEYTGAPYFAGISALKVGADLTHVFCAREAAPVIKSYSPELIVHPVLDSSDAVEEVKKWLPRLHALVVGPGLGRDDLLLNNVRGILESTKARDIPVVIDADGLWLIAQRPALVHGYQKAVLTPNHVEFSRLWDAVLSSPMDTSNHSGSVLKLSQALGNITIVQKGEQDLISNGQQVLVCNQEGSSRRCGGQGDLLSGSLGVMAHWALRAGPEKTNGSSPLLVAAWGACTLTRECNHLAFQKYGRSTTTTDMIAEVGAAFSKLFTT

SEQ ID NO: 657 - protein, 61 aa, Rat
MPCWSLYQLMVLYQIIILFFLFKQVSVRTCYLSTEGKPCGSVLFACKSLQQCLLTVLVTPV

SEQ ID NO: 658 - protein, 1172 aa, Rat
MLWALALLALGIGPRAYAGDHGEDTAFDLFSISNINRKTIGAKQFRGPDPGVPAYRFVRFDYVPPVNTDDLNRIVKLARRKEGFFLTAQLKQDRKSRGTLLVLEGPGTSQRQFEIVSNGPGDTLDLNYWVEGHQHTNFLEDVGLADSQWKNVTVQVASDTYSLYVGCDLIDSVTLEEPFYEQLEADKSRMYVAKGASRESHFRGLLQNVHLVFADSVEDILSKKGCQHSQGAEVNTISEHTETLHLSPHITTDLVVQGVEKAQEVCTHSCEELSNMMNELSGLHVMVNQLSKNLERVSSDNQFLLELIGGPLKTRNMSACVQEGRIFAENETWVVDSCTTCTCKKFKTVCNQITCSPATCANPSLVEGECCPSCSHSADNDEGWSPWAEWTECSVTCGSGTQQRGRSCDVTSNTCLGPSIQTRTCSLGKCDTRIRQNGGWSHWSPWSSCSVTCGVGNVTRIRLCNSPVPQMGGKNCKGSGRETKACQRAPCPIDGRWSPWSPWSACTVTCAGGIRERTRVCNSPEPQYGGKDCVGDVTEHQMCNKRSCPIDGCLSNPCFPGAKCNSFPDGSWSCGSCPVGFLGNGTHCEDLDECAVVADICFSINKASRCVNTNPGFHCLPCPPRYKGTQPFGIGLEDAKTEKQVCEPENPCKDKTHNCHKHAECIYLGHFSDPMYKCECQTGYAGDGLICGEDSDLDGWPNSNLVCATNATYHCVKDNCPKLPNSGQEDFDKDGIGDACDEDDDNDGVSDEKDNCPLLFNPRQLDYDKDEVGDRCDNCPYVHNQAQIDTDNNGEGDACSVDIDGDDVFNERDNCPYVYNTDQRDTDGDGVGDHCDNCPLMHNPDQMDQDNDLVGDQCDNNEDIDDDGHQNNQDNCPYISNSNQADHDNDGKGDACDSDDDNDGVPDDRDNCRLVFNPDQKDSDGDGRGDICKDDFDNDNVPDIDDVCPENNAITETDFRNFQMVPLDPKGTTQIDPNWVIRHQGKELVQTANSDPGIAVGFDEFGSVDFSGTFYVNTDRDDDYAGFVFGYQSSSRFYVVMWKQVTQTYWEDKPSRAYGYSGVSLKVVNSTTGTGEHLRNALWHTGNTEGQVRTLWHDPKNIGWKDYTAYRWHLIHRPKTGYMRVLVHEGKQVMADSGPIYDQTYAGGRLGLFVFSQEMVYFSDLKYECRDA

SEQ ID NO: 659 - protein, 442 aa, Rat
MELLSRVLLWKLVLLQSSAVLSSGSPGTAAASSSVVSESAVSWAAGTQAVLRCQSPRMVWTQDRLHDRQRVVHWDLSGGPGSQGRRLVDMYSAGEQRVYQPRDRDRLLLSPSAFHDGNFSLLIRAVERGDEGVYTCNLHHHYCHLYESLAVRLEVTDDPLLSRAYWDGEKEVLVVALGAPALMTCVNREHLWTDRHLEEAQQVVHWDRQLPGVPHDRADRLLDLYASGERRAYGPPFLRDRVSVNTNAFARGDFSLRIDDLEPADEGIYSCHLHHHYCGLHERRVFHLRVTEPVFEPPARASPGNGSGHNSVPSPDPTMARGHSIINVIVPEDHTHFFQQLGYVLATLLLFILLLITVVLATRHRHSGGCKTSDRKAGKSKGKDVNMMEFAIATRDQAPYRTEDIQLDYKNNILKERAGLAHSPLPAKDVDLDKEFRKEYCK

SEQ ID NO: 660 - protein, 218 aa, Rat
QLSPLDFPHLPHQSELSSTARARPPNAAIDRRQGQLLFSCPWSCITSTHTFIASSTVLPGKVQAPFSRVLQLVRGRASSPKLMTLWGAFPPARGDEVLGRGWNITSVPLPSHSRQVAGSASHTHTLGAASPTPLSPGPAPLCSTMLPGQGTGPTLPSAGTVPALPSAATGEGWGQVSRGPHPVRDGVVHIPWTCTWCLMAAPTRNTPMSSIGNMSHGH

SEQ ID NO: 661 - protein, 108 aa, Rat
MSLIQAIVYKVHSFSCDLEYIYNLDGIQVRNKAIGCPQRHQLPALQEATAFAGVHRPLQIHPLGRGLRPWEQQQQRHCGHIWPGWEPLRSDSLALGTASCETNRNSPL

SEQ ID NO: 662 - protein, 516 aa, Rat
NQGRRGRSSKPSIKTPEPIVPTGPELQPLTSAEQPVTPNLTSRASRGRSNKSIRTPEPVVQTGPEFHPSTSSEQSDTPEPSSQGRTRRSVRTPEASVSTTPALQPSTSKKQPTPKPTALVTRGRTHKPSTEGLESVGPVAPDFEPPTSTDHLATSKVTGQSLTLQSSPVSASPVSTTPELKPPVPIAQPLTLEPVPQTSHQRRRRATGKQGSRTAPVGPKSYSTPAEPEPQSSASQSSGASEADSPHQKRPRRQVTQKTVVVKEEDPGEIQVKEEPQETAISTPGKRKRDPAEGETQGNPTRSRRTKPNQEAAAPKVLFTGVVDSRGERAVLALGGSLASSVNEASHLVTDRIRRTVKFLCAVGKGIPILSLNWLYQSRKAGCFLPPDDYLVTDPEQEKNFSFSLRDSLSRARERRLLEDYEIHVTPGVQPPPPQMGEIISCCGGTVLPSMPHSYKLHRVVITCTEDLPRCAIASRLGLPLLSPEFLLTGVLKQEATPEAWSSPIWKCSLPKKKKK

SEQ ID NO: 663 - protein, 747 aa, Rat
EATVITTEKRERPAPPRELLVPQAEVTARSLRLQWVPGSDGASPIRYFTVQVRELPGGEWQTYSSSISHEATLCAVERLRPFTSYKLRLKATNDIGDSDFSAETEAVTTLQDVPGEPPGSVSATPHTTSSVLIQWQPPRDESLNGLLQGYRIYYRELESETGLSPEPKTLKSPSALRAELTAQSSFKTVNSSSTLTTYELTHLKKYRRYEVIMTAYNIIGESPASVPVEVFVGEAAPAMAPQNIQVTPLTASQLEVTWDPPPPESQNGNIQGYKVYYWEADSRNETEKMKVLFLPEPVVKIKDLTSHTKYLVSISAFNAAGDGPRSDPCQGRTHQAAPGPPSFLEFSEITSTTLNVSWGEPSAANGILQGYRVVYEPLAPVQGVSKVVTVDVKGNWQRWLKVRDLTKGVTYFFRVQARTIAYGPELQANVTAGPAEGSPGSPRNVLVTKSASELTLQWTEGNTGNTPTTGYVIEARPSDEGLWDMFAKDIPRSATSYTVGLDKLRQGVTYEFRVVAVNKAGFGEPSRPSIAVSAQAEAPFYEEWWFLLVIALSSLLLVLLVVFVLVLHGQSKKYKNCGSGKGISNMEETVTLDNGGFAALELNSRHLNVKSTFSKKNGTRSPPRPSPGGLHYSDEDICNKYNGAVLTESVNLKEKSVDGSESEASDSDYEEALPKHSFVNHYMSDPTYYNFWKRRPPAAAPHRYEAVAGAEAGPHLHTVITTQSAGGVYTPAGPGARAPLTGFSSFV

SEQ ID NO: 664 - protein, 307 aa, Rat
MQLNRFFSGPGLFLLLFCSLCVEAEVKEVNAMVGSDVELRCVYPRRSHFSLDDLYVYWQIVDEAKTVVTYYLPSANESSTIHVSNSYKNRAHLSPDLMKEGDFSLHLQNVTPQDTQEFKCLVFRMSTVLGKALEEVVRLRVAANFSTPVISTSGSSDPGQERTFTCMSKNGYPEPNLYWINRTDNTLIDETLQNNTVYLNELGLYDVVSTLRIPWTPHVDVICCVENVALHQNITSISRADSFTGSMNTERPQEIHREATKVLFYALAALLAVVVVIFIIVLYRCRRRPCQSYTGPRAVQLELTDHS

SEQ ID NO: 665 - protein, 143 aa, Rat
KKYDTKAAYCQSKLAVVLFTKELSRRLQGTGVTVNALHPGVARTELGRHTGMHNSAFSGFMLGPFFWLLFKSPQLAAQPSTYLAVAEELESVSGKYFDGLREKAPSPEAEDEEVARRLWTESAHLVGLDMAHGSSGRGHSISR

SEQ ID NO: 666 - protein, 298 aa, Mouse
MESANTLCPGRKCKGGVLAHLERLEAQTNISNRKSEEPAVRKKESSLRTKIRELRQQRDKLRAEVKQWGARVKEPPAKEDPSRTVISEQEVLEREWRNVDAILEAYRFTGLSGKLTSRGVCMCISTAFEGNLLDSYFVDLVIEKPLRIHHHSVPVFIPLEKIAAAHLQTDVQRFLFRLWEYLNAYAGRKYQADQLESDFCDVLTGPLQRNALCNLLSFTYKVEQRCQTFSFSARLLYEDPTAALPTNVTVTRPGVEASSPPWEEHRASHQMLFRTKPLHKVFASFSKETEKLHLNLVS

SEQ ID NO: 667 - protein, 226 aa, Mouse
MEAELGGSFIKLRQALFQLNSVDSSLLFTAQALLRWHDGHQFCSKSGQPTQKNVAGSKRVCPSSKIIYYPQMAPVVITLVSDGARCLLARQSSFPKGLYSALAGFCDIGESVEETVHREVAEEVGLEVENIQYSASQHWPFPNSSLMIACHATVKPGHTEIQVNLKELEAAAWFSLDEVTTALRRKGSLALQPSEASPLLLPPKLAIAHHLIKKWVETRSCSSLAA

SEQ ID NO: 668 - protein, 781 aa, Mouse
MEMMKKLIAGQGPEPQPSNRPTSRLGGSLLFGNLVPANKDAPALEPLGTKLSALPPHGAPGVRKVPGQLPLLCSGRPPPEKPAPIEPPEGWSPAPKTQGKLNTRPGKVILFSEPGCRGRGREVWGDIADASAWDPVASIRVIRGCWILYEQPEFRGQKLSLPEGDVELRALACAWSLQGFGSLRRAVQDYCTPTISLFSEEGLKGKPVTLTGDLKDSQGLERPLQVASATVTAGLWLLYPKPFFEDTPYILEPGEYPTLEAWGTSGPSVGSLKPMRLGCPSVEKPGEPKAVVYEAPGFQGQSWEVSGDIYNLQQPEDSQSPQLTSVGSLRILGGCWVGYEKEGFRGHQYLLEEGEYADWSHWGGYDELLTSLRVIRTDFGDPAVVLFEDMDFQGHRVEVSSALPDVELAQHGPSTQAIHVLSGVWVAYERVGFSGEQYILEKGVYRNCDDWGSGNCALGSLQPVVQVGESDLHFVTKIQLFSGPNFLGDHISFEDDQASLPASFHPQSCRVHGGSWVLFEDKNFEADQHIVSEGEFPTLTDMGCLASTVLGSLRKVPLHFSEPSLSLFGLECFEGKEIELTGEVRSLQAEGFNNHVLSVRVKGGVWVVCEHSDFRGRQWLVGSCEITNWLTYSGTQRVGSLYPIKQRRAYFRLWNAALGGFLSVPDHVEDMKAGRVVVSEPRAGGSCIWYYEDGLLKNQMAPTMSLQVIGPPSPGSKVVLWAESRLPRQTWSINELGHICSQMFEGQILDVKGGRGYDRDHVVLWEPTKDRLSQIWTVHVL

SEQ ID NO: 669 - protein, 70 aa, Mouse
MYMTMRGKEPWQTAKLQLGELNRTAVFTCRPARVKEGDILYIHSLQTVGSNHKPVAAEHTYWAWPEETDV

SEQ ID NO: 670 - protein, 368 aa, Mouse
LTNGSQASDKSEEGSADTADPQENPLQPVSVGEEPSITEHHSVGEQAWDGTSQSCPSLPATVSFHMDSTDLEPGQQTAMKSCSRDDVEMVEEFDELPTDAVRRIRRELVTVTKHSPEQRQDPLCISITVCTVEKDRPAALDSLEEPLPGMLFFLSSGQDQQAHPQLREHPAPEASEASQPQDAAEGSSAGEEKDASVEPLLPAASPGGSTSQVLEAATCKKQVSQDFLETRFKIQQLLEPQQYMACLPHHIIVKIFRLLPTLSLAILKCTCRYFKSIIEYYNIRPADSRWVRDPRYREDPCKQCKKKYVKGDVSLCRWHPKPYCQALPYGPGYWMCCPPVSEGLFCCKLGLHDNHWLPACHSFNPGNP

SEQ ID NO: 671 - protein, 293 aa, Mouse
THFIHTLTRLQMEQGAESLGDLESPVEDTPVEQAALSPFPPSKPPVSSELGDSSCSSDMTDSSTTLSSGSSEPPNHPAHPSLPGPSFRSGVDEDSLEQILNFSDSDLGIEEEEEEGGGVGNSDNLSCFHLADIFGTGDPGSLASWTHSQSGSSLASGILDENANLDASCFLNSGLGGLREGSLPGSSGSPEGDAVQSSSWDLSLSSCDSFELLQALPDYSLGPHYTSRRVSGSPDSLETFHPLPSFSPPRDASTCFLESLVGLSEPVTEVLAPLLESQFEDAALAPLLEPVPV

SEQ ID NO: 672 - protein, 904 aa, Mouse
MEVNCLTLKDLISPRQTRLDFAIEDAENAQKENIFVDRSRMTPKTPMKNEPIDLSKQRIFTPDRNPITPVKPVDRQPQVEPWTPTANLKMLISAASPDIRDREKKKELFRPIENKEDAFVNSLQLDVAGDGAVDEYEKQRPSRKQKSLGLLCQKFLARYPSYPLSTEKTTISLDEVAVSLGVERRRIYDIVNVLESLHLVSRVAKNQYGWHGRHSLPKTLRTLQRLGEEQKYEEQMACLQQKELDLMGYRFGERRKDGSPDPRDPHLLDFSEADYPSSSANSRKDKSLRIMSQKFVMLFLVSKTKIVTLDVAAKILIEESQDTPDHSKFKTKVRRLYDIANVLTSLALIKKVHVTEERGRKPAFKWIGPVDFSSIDEELLDVSASILPELKKEAYGQIRVCAKERLVRYGSFNTVHTSEKIQRKVSSEPSSPQGERQGSAYSLEIGSLAAIYRQKVEDNSQEEAFVSNTAVPPASILDPALSMDSEYCVKPLAQPVFSVAQTDLPAFSAQNGPSGQVGVPVPSAASDTENLKPALLAGQPLVYVPSTQLFMLYGSVQEGLSPESRSEEDGGGSDVPADLSVTPSAQKRLCEERDPQEEEDEPAMKRQSQEFEDSPLSLVMPKKPSSSTDLACPVTMGNGSSPPLEDACVKGQLPAAEEVTGKAAPNCYVASECGNPARNPDTEKPSNENEITKDPSLMQYLYVQSPAGLNGFNMVLPGTQTPHTVAPSPAQLPSFGVPCMFLQSPGLGPFPVLYSPAIPGPISSAPGTHPNPGPMNFGLSTLASASHLLISPAAMVNPKPSTLPCTDPQLRCQPSLNLNPVMPGSHGVIHPESPCYVRHPVSMVKAEQSPAPATPKSIQRRHRETFFKTPGSLGDPVFRRKERNQSRNTSSAQRRLEISSSGPD

SEQ ID NO: 673 - protein, 173 aa, Mouse
KRRKRKRSEGLSQEATPSQDLIQHSCSPVDHSEPEARTELQKKKKKKRRKRKPEPQQDEESKHPGDQRSPRPSVTPVPALSVNGHLPSDCLVLTWDGEPSAISQDAIKDSRLARTQTVVDDWDEEFDRGKEKKIKKFKREKKRNFNAFQKLQSRRNFWSVTHPAKVASLSYRR

SEQ ID NO: 674 - protein, 470 aa, Mouse
EETKPLLGSDVSGPEGTKVMGAVPCRRALLLCNGMRYKLLQEGDIQVCVIRHPRTFLSKILTSKFLRRWEPHHLTLADNSLASATPSGYMENSVSYSAIEDVQPLSWENAPKYCLQLTIPGGTVLLQAANSYLRDQWFHSLQWKKKIYKYKKVLSNPSRWEVVLKEIRTLVDMALTSPLQDDSINQAPLEIVSKLLSENTNLTTQEHENIIVAIAPLLENNHPPPDLCEFFCKHCRERPRSMVVIEVFTPVVQRILKHNMDFGKCPRLRLFTQEYILALNELNAGMEVVKKFIQSMHGPTGHCPHPRVLPNLVAVCLAAIYSCYEEFINSRDNSPSLKEIRNGCQQPCDRKPTLPLRLLHPSPDLVSQEATLSEPRLKSVVVASSEVHVEVERTSTAKPALTASTGNDSEPNLIDCLMVSPACGTMSIELGPQAGRTLGCHVEILKLLSDYDDWRPSLASLLQPIPFPKE

SEQ ID NO: 675 - protein, 319 aa, Mouse
FARTLPWASVLRVWDMFFCEGVKIIFRVALVLLRHTLGSVEKLRSCQGMYETMEQLRNLPQQCMQEDFLVHEVTNLPVTEAWIERENAAQLKKWRETRGELQYRPSRRLHGSRAIHEERRRQQPPLGPSSSLLSLPSLKSRGSRAVGGAPSPPPPVRRASAGPVPGAVVIAEGLHPSLPSPTGNSTPLGTSKEIRRQEKERQKQEKDREKERQRQEKERERQERSGRSGKRSKRRNSRSRRRSGRSWRRKAKAGNCPCVEGQMGPRHPMMVGTGQQLRPGRMLTFDLWLDLDGMALLLPLIESSPGRLSQLPLAGSSFF

SEQ ID NO: 676 - protein, 94 aa, Mouse
MFSEKKHFLHTIQNPESEKERRRRRRRRRSRRRERKKERKKERKKERKQASLPSVKRERAWHGEQTQGSLSTVRQESSPGHRAKVIADLGKNDQ

SEQ ID NO: 677 - protein, 137 aa, Mouse
VRWKMRRSLRAGRRRQTAGRKSKSPPKVPIVIQDDSLPTGPPPQIRILKRPTSNGVVSSPNSTSRPALPVKSLAQREAEYAEARRRILGSASPEEEQEKPILDRPTRISQPEDSRQPSNVIRQPLGPDGSQGFKQRR

SEQ ID NO: 678 - protein, 380 aa, Mouse
ETTITTDSRDYQMAKGKRKNLTNRNQDHSLSSEPSTPTSASPGYPDTPEKQDSNLKSYLMMLVEDIKKGFNNSLKEVKENTAKEVEVLKEIQENTTKQVMELNKIIQDLKREVETKKTQNETTLEIETLVKKSGTIDVSISNRIQEMEERISGAEDSIENIGTTTKENAKRKKILTQNIQKIQDKMRRPNLWIIGVDENEDSQLKGPANIFNKFIEENFPNLKKEMSMNRQEAYRTPNRLDQKRNSSLHIIIRTTNALNKDRILKAVREKSQVTYKGRPIRITPDFSPETMKARRSWTDVMQTLREHKCQPRLLYPAKLSITIDGETKVFHDKTKFTQYLSMNPGLQRIIKGKHQHKDGNYTLEKARKRSFNKPKRRQPK

SEQ ID NO: 679 - protein, 210 aa, Mouse
YGTHNHCWLSLHRGFIWSFLGPAAAIILINLVFYFLIIWILRSKLSSLNKEVSTLQDTKVMTFKAIVQLFVLGCSWGIGLFIFIEVGKTVRLIVAYLFTIINVLQGVLIFMVHCLLNRQVRMEYKKWFHRLRKEVESESTEVSHSTTHTKMGLSLNLENFCPTGNLHDPSDSILPSTEVAGVYLSTPRSHMGAEDVNSGTHAYWSRTISD

SEQ ID NO: 680 - protein, 373 aa, Mouse
MKEYVMLLLLAVCSAKPFFSPSHTALKNMMLKDMEDTDDDDNDDDDNSLFPTKEPVNPFFPFDLFPTCPFGCQCYSRVVHCSDLGLTSVPNNIPFDTRMVDLQNNKIKEIKENDFKGLTSLYALILNNNKLTKIHPKTFLTTKKLRRLYLSHNQLSEIPLNLPKSLAELRIHDNKVKKIQKDTFKGMNALHVLEMSANPLENNGIEPGAFEGVTVFHIRIAEAKLTSIPKGLPPTLLELHLDFNKISTVELEDLKRYRELQRLGLGNNRITDIENGTFANIPRVREIHLEHNKLKKIPSGLQELKYLQIIFLHYNSIAKVGVNDFCPTVPKMKKSLYSAISLFNNPMKYWEIQPATFRCVLGRMSVQLGNVGK

SEQ ID NO: 681 - protein, 466 aa, Mouse
MWGCWLGLLLLLLAGQAALEARRSRWRRELAPGLHLRGIRDAGGRYCQEQDMCCRGRADECALPYLGATCYCDLFCNRTVSDCCPDFWDFCLGIPPPFPPVQGCMHGGRIYPVFGTYWDNCNRCTCHEGGHWECDQEPCLVDPDMIKAINRGNYGWQAGNHSAFWGMTLDEGIRYRLGTIRPSSTVMNMNEIYTVLGQGEVLPTAFEASEKWPNLIHEPLDQGNCAGSWAFSTAAVASDRVSIHSLGHMTPILSPQNLLSCDTHHQQGCRGGRLDGAWWFLRRRGVVSDNCYPFSGREQNEASPTPRCMMHSRAMGRGKRQATSRCPNGQVDSNDIYQVTPAYRLGSDEKEIMKELMENGPVQALMEVHEDFFLYQRGIYSHTPVSQGRPEQYRRHGTHSVKITGWGEETLPDGRTIKYWTAANSWGPWWGERGHFRIVRGTNECDIETFVLGVWGRVGMEDMGHH

SEQ ID NO: 682 - protein, 210 aa, Mouse
MRLRLLALAAAVLLGPAPEVCGALNVTVSPGPVVDYLEGENATLLCHVSQKRRKDSLLAVRWFFAPDGSQEALMVKMTKLRIIQYYGNFSRTANQQRLRLLEERRGVLYRLSVLTLRPTDQGQYVCKVQEISKHRNKWTAWSNGSSATEMRVISLKAGEDSSFEKKKVTWAFFEDLYVYAVLVCCVGILSVLLFTLVIACSLCFTRGNQE

SEQ ID NO: 683 - protein, 255 aa, Mouse
MDFWLWLLYFLPVSGALRVLPEVQLNVEWGGSIIIECPLPQLHVRMYLCRQMAKPGICSTVVSNTFVKKEYERRVTLTPCLDKKLFLVEMTQLTENDDGIYACGVGMKTDKGKTQKITLNVHNEYPEPFWEDEWTSERPRWLHRFLQHQMPWLHGSEHPSSSGVIAKVTTPASKTEAPPVHQPSSITSVTQHPRVYRAFSVSATKSPALLPATTASKTSTQQAIRPLEASYSHHTRLHEQRTRHHGPHYGREDRG

SEQ ID NO: 684 - protein, 228 aa, Mouse
MKALRAVLLILLLSGQPGSGWAQEDGDADPEPENYNYDDDDDEEEEEETNMIPGSRDRAPLQCYFCQVLHSGESCNQTQSCSSSKPFCITLVSHSGTDKGYLTTYSMWCTDTCQPIIKTVGGTQMTQTCCQSTLCNIPPWQNPQVQNPLGGRADSPLESGTRHPQGGKFSHPQVVKAAHPQSDGANLPKSGKANQPQGSGAGYPSGWTKFGNIALLLSFFTCLWASGA

SEQ ID NO: 685 - protein, 242 aa, Mouse
MASGWFYLSCMVLGSLGSMCILFTAYWMQYWRGGFAWDGTVLMFNWHPVLMVAGMVVLYGAASLVYRLPSSWVGPRLPWKVLHAALHLLAFTCTVVGLIAVFRFHNHSRIAHLYSLHSWLGITTVVLFACQWFLGFAVFLLPWASQWLRSLLKPLHVFFGACILSLSITSVISGINEKLFFVLKNATKPYSSLPGEAVFANSTGLLVVAFGLLVLYVLLASSWKRPDPGALTDRQPLLHDRE

SEQ ID NO: 686 - protein, 188 aa, Mouse
MRLPLPLLLLFGCRAILGSAGDRVSLSASAPTLDDEEKYSAHMPAHLRCDACRAVAFQMGQRLAKAEAKSHTPDASGLQELSESTYTDVLDQTCSQNWQSYGVHEVNQMKRLTGPGLSKGPEPRISVMISGGPWPNRLSKTCFHYLGEFGEDQIYEAYRQGQANLEALLCGGTHGPCSQEILAQREEL

SEQ ID NO: 687 - protein, 247 aa, Mouse
MIPQVVTSETVTVISPNGISFPQTDKPQPSHQSQDRLKKHLKAEIKVMAAIQIMCAVMVLSLGIILASVPSNLHFTSVFSILLESGYPFVGALFFAISGILSIVTEKKMTKPLVHSSLALSILSVLSALTGIAILSVSLAALEPALQQCKLAFTQLDTTQDAYHFFSPEPLNSCFVAKAALTGVFSLMLISSVLELGLAVLTATLWWKQSSSAFSGNVIFLSQNSKNKSSVSSESLCNPTYENILTS

SEQ ID NO: 688 - protein, 121 aa, Mouse
YQRRSKTLEELANDIKEDAIAPRTLPWTKGSDTISKNGTLSSVTSARALRPPKAAPPRPGTFTPTPSVSSQALSSPRLPRVDEPPPQAVSLTPGGVSSSALSRMGAVPVMVPAQSQAGSLV

SEQ ID NO: 689 - protein, 255 aa, Mouse
PAFSSAAMSWSPILPFLSLLLLLFPLEVPRAATASLSQASSEGTTTCKVHDVCLLGPRPLPPSPPVRVSLYYESLCGACRYFLVRDLFPTWLMVMEIMNITLVPYGNAQERNVSGTWEFTCQHGELECRLNMVEACLLDKLEKEAAFLTIVCMEEMDDMEKKLGPCLQVYAPEVSPESIMECATGKRGTQLMHENAQLTDALHPPHEYVPWVLVNEKPLKDPSELLSIVCQLDQGTEKPDICSSIADSPRKVCYK

SEQ ID NO: 690 - protein, 255 aa, Mouse
MVWTQDRLHDRQRVVHWDLSGDPGSQRRRLVDMYSAGEQRVYEPRDRDRLLLSPSAFHDGNFSLLIRAVERGDEGVYTCNLHHHYCHLDESLAVRLEVTDDPLLSRAYWDGEKEVLVVAHGAPALMTCINRAHVWTDRHLEEAQQVVHWDRQLPGVSHDRADRLLDLYASGERRAYGPPFLRDRVSVNTNAFARGDFSLRIDELERADEGIYSCHLHHHYCGLHERRVFHLQVTEPAFEPPARASPGNGSGHSSA

SEQ ID NO: 691 - protein, 255 aa, Mouse
MKLKQRVVLLAILLVIFIFTKVFLIDNLDTSAANREDQRAFHRMMTGLRVELVPKLDHTLQSPWEIAAQWVVPREVYPEETPELGAIMHAMATKKIIKADVGYKGTQLKALLILEGGQKVVFKPKRYSRDYVVEGEPYAGYDRHNAEVAAFHLDRILGFRRAPLVVGRYVNLRTEVKPVATEQLLSTFLTVGNNTCFYGKCYYCRETEPACADGDMMEGSVTLWLPDVWPLQKHRHPWGRTYREGKLARWEYDES

SEQ ID NO: 692 - protein, 255 aa, Mouse
MQTMWGSGELLVAWFLVLAADGTTEHVYRPSRRVCTVGISGGSISETFVQRVYQPYLTTCDGHRACSTYRTIYRTAYRRSPGVTPARPRYACCPGWKRTSGLPGACGAAICQPPCGNGGSCIRPGHCRCPVGWQGDTCQTDVDECSTGEASCPQRCVNTVGSYWCQGWEGQSPSADGTRCLSKEGPSPVAPNPTAGVDSMAREEVYRLQARVDVLEQKLQLVLAPLHSLASRSTEHGLQDPGSLLAHSFQQLDRI

SEQ ID NO: 693 - protein, 255 aa, Mouse
MRLTVGALLACAALGLCLAVPDKTVKWCAVSEHENTKCISFRDHMKTVLPPDGPRLACVKKTSYPDCIKAISASEADAMTLDGGWVYDAGLTPNNLKPVAAEFYGSVEHPQTYYYAVAVVKKGTDFQLNQLEGKKSCHTGLGRSAGWVIPIGLLFCKLSEPRSPLEKAVSSFFSGSCVPCADPVAFPKLCQLCPGCGCSSTQPFFGYVGAFKCLKDGGGDVAFVKHTTIFEVLPEKADRDQYELLCLDNTRKPVD

SEQ ID NO: 694 - protein, 255 aa, Mouse
GAPTPAYVRSARRTEPLASGARSRLCQCRRVPARKQGPQEQGGSGESTTSSPQWWRRWRRLWSTCSCSADDRHTGSHTDLKEETPSWTQISVVFRKDGQDELQAAHKAHGSGSPLTNQEIPSSSGSGFIVSEDGLIVTNAHVLTNQQKIQVELQSGARYEATVKDIDHKLDLALIKIEPDTELPVLLLGRSSDLRAGEFVVALGSPFSLQNTVTAGIVSTTQRGGRELGLKNSDIDYIQTDAIINHGNSGGPLVN

SEQ ID NO: 695 - protein, 174 aa, Mouse
MPACRLCLLAAGLLLGLLLFTPISATGTDAEKPGECPQLEPITDCVLECTLDKDCADNRKCCQAGCSSVCSKPNGPSEGELSGTDTKLSETGTTTQSAGLDHTTKPPGGQVSTKPPAVTREGLGVREKQGTCPSVDIPKLGLCEDQCQVDSQCSGNMKCCRNGCGKMACTTPKF

SEQ ID NO: 696 - protein, 193 aa, Mouse
LATLVQVSRIRAYSQGQTQDQQGSSSLDKVAVPREQTHSGLEQIQQIQQQLTQFNASLAGLCRPCPWDWELFQGSCYLFSRTLGSWETSASSCEDLGAHLVIVNSVSEQRFMKYWNVRKNQRSWIGLSDHIHEGSWQWVDGSALKFSFWKEGEPNNDGDEDCVELFMDDWNDNKCTEQNFWVCEQPSAPCPHH

SEQ ID NO: 697 - protein, 173 aa, Mouse
VRNGDLFFKKVQVEDGGVYTCYAMGETFNETLSVELKVYNFTLHGHHDTLNTAYTTLVGCILSVVLVLIYLYLTPCRCWCRGVEKPSSHQGDSLSSSMLSTTPNHDPMAGGDKDDGFDRRVAFLEPAGPGQGQNGKLKPGNTLPVPEATGKGQRRMSDPESVSSVFSDTPIVV

SEQ ID NO: 698 - protein, 88 aa, Mouse
MEEITCAFLLLLAGLPALEASDPVDKDSPFYYDWESLQLGGLIFGGLLCIAGIAMALSGKCKCRRTHKPSSLPGKATPLIIPGSANTC

SEQ ID NO: 699 - protein, 155 aa, Mouse
MYSEGAPFWTGIVAMLAGAVAFLHKKRGGTCWALMRTLLVLASFCTAVAAIVIGSRELNYYWYFLGDDVCQRDSSYGWSTMPRTTPVPEEADRIALCIYYTSMLKTLLMSLQAMLLGIWVLLLLASLTPVCVYIWKRFFTKAETEEKKLLGAAVI

SEQ ID NO: 700 - protein, 255 aa, Mouse
MLQHTSLVLLLASIWTTRHPVQGADLVQDLSISTCRIMGVALVGRNKNPQMNFTEANEACKMLGLTLASRDQVESAQKSGFETCSYGWVGEQFSVIPRIFSNPRCGKNGKGVLIWNAPSSQKFKAYCHNSSDTWVNSCIPEIVTTFYPVLDTQTPATEFSVSSSAYLASSPDSTTPVSATTRAPPLTSMARKTKKICITEVYTEPITMATETEAFVASGAAFKNEAAGFGGVPTALLVLALLFFGAAAVLAVCYV

SEQ ID NO: 701 - protein, 91 aa, Mouse
MVWANLAVFVICFLPLHVVLTVQVSLNLNTCAARDTFSRALSITGKLSDTNCCLDAICYYYMAREFQEASKPATSSNTPHKSQDSQILSLT

SEQ ID NO: 702 - protein, 244 aa, Mouse
GWQGAPDPRGLGQLSQPYMGGEMPWTILLFASGSLAIPAPSISLVPPYPSSHEDPIYISCTAPGDILGANFTLFRGGEVVQLLQAPSDRPDVTFNVTGGGSGGGGEAAGGNFCCQYGVMGEHSQPQLSDFSQQVQVSFPVPTWILALSLSLAGAVLFSGLVAITVLVRKAKAKNLQKQRERESCWAQINFTNTDMSFDNSLFAISTKMTQEDSVATLDSGPRKRPTSASSSPEPPEFSTFRACQ

SEQ ID NO: 703 - protein, 255 aa, Mouse
MAQLARATRSPLSWLLLLFCYALRKAGGDIRVLVPYNSTGVLGGSTTLHCSLTSNENVTITQITWMKKDSGGSHALVAVFHPKKGPNIKEPERVKFLAAQQDLRNASLAISNLSVEDEGIYECQIATFPRGSRSTNAWLKVQARPKNTAEALEPSPTLILQDVAKCISANGHPPGRISWPSNVNGSHREMKEPGSQPGTTTVTSYLSMVPSRQADGKNITCTVEHESLQELDQLLVTLSQPYPPENVSISGYDGN

SEQ ID NO: 704 - protein, 255 aa, Mouse
MFLVGSLVVLCGLLAHSTAQLAGLPLPLGQGPPLPLNQGPPLPLNQGQLLPLAQGLPLAVSPALPSNPTDLLAGKFTDALSGGLLSGGLLGILENIPLLDVIKSGGGNSNGLVGGLLGKLTSSVPLLNNILDIKITDPQLLELGLVQSPDGHRLYVTIPLGLTLNVNMPVVGSLLQLAVKLNITAEVLAVKDNQGRIHLVLGDCTHSPGSLKISLLNGVTPVQSFLDNLTGILTKVLPELIQGKVCPLVNGILSG

SEQ ID NO: 705 - protein, 255 aa, Mouse
MATTTCQVVGLLLSLLGLAGCIAATGMDMWSTQDLYDNPVTAVFQHEGLWRSCVQQSSGFTECRPYFTILGLPAMLQAVRALMIVGIVLGVIGILVSIFALKCIRIGSMDDSAKAKMTLTSGILFIISGICAIIGVSVFANMLVTNFWMSTANMYSGMGGMGGMVQTVQTRYTFGAALFVGWVAGGLTLIGGVMMCIACRGLTPDDSNFKAVSYHASGQNVAYRPGGFKASTGFGSNTRNKKIYDGGARTEDDEQ

SEQ ID NO: 706 - protein, 255 aa, Mouse
MGRFAAALVGSLFWLGLLLCGLGSLASAEPRAPPNRIAIVGAGIGGTSSAYYLRKKFGKDVKIDVFEREEVGGRLATLKVQGHDYEAGGSVIHPLNLHMKRFVKELGLSSVPASGGLVGVYNGKSLVFEESSWFVINVIKLVWRYGFQSLRMHMWVEDLLDKFMRIYRYQSHDYAFSSVEKLMHAIGGDDYVRLLNQTLRENLKKAGFSETFLNEMIAPVMKVNYGQSTDINAFVGAVSLTAADSNLWAVEGGNK

SEQ ID NO: 707 - protein, 150 aa, Mouse
MSWWRDNFWIILAMSIIFISLVLGLILYCVCRWQLRQGRNWEIAKPSKQDGRDEEKMYENVLNSSPGQLPALPPRGSPFPGDLAPQEAPRQPSAWYSSVKKVRNKKVFAISGSTEPENDYDDVEIPATTETQHSKTTPFWQAEVGLHSSF

SEQ ID NO: 708 - protein, 114 aa, Mouse
MFLVYFSRRGHCINYVKGHADSLAPWCCGVGLRSPLARPQHGHVSPKDHVPGGHAPGPSHKWLCTAALWRYLEHSAVTHGTALPEAHAVRGKHGKKGRRVVCCSVDFPQATSLF

SEQ ID NO: 709 - protein, 132 aa, Mouse
AHPRPGARRPRLLAFQASCAPAPGSRDRCPEEGGPRCLRVYAGLIGTVVTPNYLDNVSARVAPWCGCAASGNRREECEAFRKLFTRNPCLDGAIQAFDSLQPSVLQDQTAGCCFPRVSWLYALTALALQALL

SEQ ID NO: 710 - protein, 255 aa, Mouse
MRVLWVLGLCCVLLTFGFVRADDEVDVDGTVEEDLGKSREGSRTDDEVVQREEEAIQLDGLNASQIRELREKSEKFAFQAEVNRMMKLIINSLYKNKEIFLRELISNASDALDKIRLISLTDENALAGNEELTVKIKCDKEKNLLHVTDTGVGMTREELVKNLGTIAKSGTSEFLNKMTEAQEDGQSTSELIGQFGVGFYSAFLVADKVIVTSKHNNDTQHIWESDSNEFSVIADPRGNTLGRGTTITLVLKEEA

SEQ ID NO: 711 - protein, 224 aa, Mouse
MALLISLPGGTPAMAQVLLLLSSGCLHAGNSERYNRKNGFGVNQPERCSGVQGGSIDIPFSFYFPWKLAKDPQMSIAWKWKDFHGEVIYNSSLPFIHEHFKGRLILNWTQGQTSGVLRILNLKESDQAQYFSRVNLQSTEGMKLWQSIPGTQLNVTQALNTTMRSPFIVTSEFTTAGLEHTSDQRNPSLMNLGAMVTMLLAKVLVIVLVYGWMIFLRWKQRPAH

SEQ ID NO: 712 - protein, 133 aa, Mouse
MALPWTILLALSGIYVQGAQAWCSEEDTLELDKLVSEPDIVKFALSAFHKKSKDEYAYRVIHIMNFLKVQEEPPQTFFVKLRLTRTICMKFEKSLDTCPLPELQNILICSFSISSPGSKQFNLLKMTCSEGLL

SEQ ID NO: 713 - protein, 255 aa, Mouse
EEEDLRRRLKYFFMSPCDKFRAKGRKPCKLMLQVVKILVVTVQLILFGLSNQLVVTFREENTIAFRHLFLLGYSDGSDDTFAAYTQEQLYQAIFYAVDQYLILPEISLGRYAYVRGGGGPWANGSALALCQRYYHRGHVDPANDTFDIDPRVVTDCIQVDPPDRPPDIPSEDLDFLDGSASYKNLTLKFHKLINVTIHFQLKTINLQSLINNEIPDCYTFSILITFDNKAHSGRIPIRLETKTHIQECKHPSVSR

SEQ ID NO: 714 - protein, 255 aa, Mouse
MNIVVEFFVVTFKVLWAFVLAAARWLVRPKEKSVAGQVCLITGAGSGLGRLFALEFARRRALLVLWDINTQSNEETAGMVRHIYRDLEAADAAALQAGKGEEEILPPCNLQVFTYTCDVGKRENVYLTAERVRKEVGEVSVLVNNAGVGSGHHLLECPDELIERTMMVNCHAHFWTTKAFLPTMLEINHGHIVTVASSLGLFSTAGVEDYCASKFGVVGFHESLSHELKAAEKDGIKTTLVCPYLVDTGMFRGCR

SEQ ID NO: 715 - protein, 200 aa, Mouse
MFPKNSRCPTCDLRKPARSKHCRLCDRCVHRFDHHCVWVNNCIGAWNTRYFLIYLLTLTASAATIATVTAAFLLRLVTVSDLYQETYLDDVGHFQAVDTVFLIQHLFLAFPRIVFLLGFVIVLSMLLAGYLCFALYLAATNQTTNEWYKGDWAWCQRWPLVAWSPSAEPRIHQNIHSHGFRSNLREIFLPATPSYKKKEK

SEQ ID NO: 716 - protein, 115 aa, Mouse
GELRALLAFTHLSSAHFWLMMTLGGLFGFAIGYVTGLLIKFTSPLTHNVSGTAKACAQTVLAVLYYEEIKSFLWWTSNLMVLGGSSAYTWVRGWEMQKTQEDPSSKDGEKSAIRV

SEQ ID NO: 717 - protein, 88 aa, Mouse
MKIPILPVVALLSLLALHAVQGAALGHPTIYPEDSSYNNYPTATEAFQSENFLNWHVITDMFKNAFPFINWDFFPKVKGLRSAAPDSQ

SEQ ID NO: 718 - protein, 84 aa, Mouse
MRLPIFHIIAFFFLVVSMGCTCAHGGQRSDLCTCGYMEVRGHVRRLLLLFSTFKRIVIEAEGGGMGWGGLQRGNREGGQHLKCK

SEQ ID NO: 719 - protein, 135 aa, Mouse
MFVAFYICTFLMRFVSTPVTRMCCPRGDAAWRRPYPLPLDLFGGTPSPGPGAGRGASCRPQAYSELVFLKVFLDPVLVNISIILTRASSCSLSLSLSLSLFNFIIILATCTFLTKFIVAIKVFYFPVHITLVSSP

SEQ ID NO: 720 - protein, 129 aa, Mouse
MIRIFVLFVFWFLIYNSPTHLYLFIFFSLFLGKPDLLHPQAIPPASLGGPLLGLPCAPVCPGLARLSPPARGSSRALMVLKPAPLPYVLHFLGPVPPLPTQPRPHLRVSDSCTVGEEVGTEMVFCKKNK

SEQ ID NO: 721 - protein, 255 aa, Mouse
MSWELLLWLLALCALILPLVQLLRFLRADADLTLLWAEWQGRRPEWELTDMVVWVTGASSGIGEELAFQLSKLGVSLVLSARRAQELERVKRRCLENGNLKEKDILVLPLDLTDTSSHEAATKAVLQEFGKIDILVNNGGRSQRSLVLETNLDVFKELINLNYIGTVSLTKCVLPHMIERKQGKIVTVNSIAGIASVSLSSGYCASKHALRGFFNALHSELGQYPGITFCNVYPGPVQSDIVKNAFTEEVTKSMR

SEQ ID NO: 722 - protein, 115 aa, Mouse
DDSTYCDYKLTFIVHIHGLPLSSKQSSFIVMVSTSFFIALVVFYILFCLLWPRIVKAWVSFRWKIHNMMAPETYSSSSSSGGFTLHSHSSEGSFEGPSRPGTKEDNVQAKRAKVA

SEQ ID NO: 723 - protein, 145 aa, Human
MCYGKCARCIGHSLVGLALLCIAANILLYFPNGETKYASENHLSRFVWFFSGIVGGGLLMLLPAFVFIGLEQDDCCGCCGHENCGKRCAMLSSVLAALIGIAGSGYCVIVAALGLAEGPLCLDSLGQWNYTFASTEGQYLGRDHA

SEQ ID NO: 724 - protein, 217 aa, Mouse
MEAGRRGAALGDLVPSRPPSFSPCPAEDLFPGRRYDGGLDSGFHSVDSGSKRWSGNESTDDFSELSFRISELARDPRGPRQPREDGAGDGDLEQIDFIDSHVPGEDEDRSAAEEQLPSELSLVAGDVEKPSSSRREEPAGEERRRPDTLQLWQERERKQQQQSGGWGSPRKDSVLKRGIRAAGAGASAPSTQATCNGPPPRTPFLYLDQVLPLQSLF

SEQ ID NO: 725 - protein, 255 aa, Mouse
MLPRGRPRAMGAAVLLLLLLLVVGFFLFGRDPDYGLGTTATLDEDPYRSRNLSASSPQLLLPPKCEMLHVAIVCAGYNSSREIITLTKSLLFYRKNPLHLHLITDAVARNILETLFRTWMVPAVVVSFYDAEELKPLVSWIPNKHYSGLYGLMKLVLPSILPPSLARVIVLDTDVTFSSDIVELWALFDHFSDKQVVGLVENQSDWYLGNLWKNHRPWPALGRGFNTGVILLWLDRLQQTGWEQMWKVTAKRELL

We claim:

1. An isolated polypeptide comprising a sequence selected from the group consisting of: SEQ ID NO: 120-197, 275-348, 373-398, 406-409, 413-415, 417, 456-463, 465, 488-509, 512, 513 and 624-725.

2. An isolated polypeptide comprising a sequence selected from the group consisting of:
(a) sequences having at least 75% identity to a sequence provided in SEQ ID NO: 120-197, 275-348, 373-398, 406-409, 413-415, 417, 456-463, 465, 488-509, 512, 513 and 624-725;
(b) sequences having at least 90% identity to a sequence provided in SEQ ID NO: 120-197, 275-348, 373-398, 406-409, 413-415, 417, 456-463, 465, 488-509, 512, 513 and 624-725; and
(c) sequences having at least 95% identity to a sequence provided in SEQ ID NO: 120-197, 275-348, 373-398, 406-409, 413-415, 417, 456-463, 465, 488-509, 512, 513 and 624-725,
wherein the polypeptide possesses at least one functional property that is substantially the same as a functional property of a sequence of SEQ ID NO: 120-197, 275-348, 373-398, 406-409, 413-415, 417, 456-463, 465, 488-509, 512, 513 and 624-725.

3. An isolated polynucleotide that encodes a polypeptide according to any one of claims 1 and 2.

4. An isolated polynucleotide of claim 3, wherein the polynucleotide comprises a sequence selected from the group consisting of: sequences provided in SEQ ID NO: 1-119, 198-276, 349-372, 399-405, 410-412, 416, 418-455, 464, 466-487, 510, 511 and 514-623.

5. An isolated polynucleotide comprising a sequence selected from the group consisting of:
(a) complements of a sequence provided in SEQ ID NO: 1-119, 198-276, 349-372, 399-405, 410-412, 416, 418-455, 464, 466-487, 510, 511 and 514-623;
(b) reverse complements of a sequence provided in SEQ ID NO: 1-119, 198-276, 349-372, 399-405, 410-412, 416, 418-455, 464, 466-487, 510, 511 and 514-623;
(c) reverse sequences of a sequence provided in SEQ ID NO: 1-119, 198-276, 349-372, 399-405, 410-412, 416, 418-455, 464, 466-487, 510, 511 and 514-623;
(d) sequences having at least 75% identity to a sequence provided in SEQ ID NO: 1-119, 198-276, 349-372, 399-405, 410-412, 416, 418-455, 464, 466-487, 510, 511 and 514-623;
(e) sequences having at least 90% identity to a sequence provided in SEQ ID NO: 1-119, 198-276, 349-372, 399-405, 410-412, 416, 418-455, 464, 466-487, 510, 511 and 514-623; and
(f) sequences having at least 95% identity to a sequence of SEQ ID NO: 1-119, 198-276, 349-372, 399-405, 410-412, 416, 418-455, 464, 466-487, 510, 511 and 514-623.

6. An isolated polynucleotide comprising a sequence selected from the group consisting of:
(a) sequences that are a 200-mer of an isolated polynucleotide according to any one of claims 3, 4 and 5;
(b) sequences that are a 100-mer of an isolated polynucleotide according to any one of claims 3, 4 and 5; and
(c) sequences that are a 40-mer of an isolated polynucleotide according to any one of claims 3, 4 and 5.

7. An expression vector comprising an isolated polynucleotide according to any one of claims 3-6.

8. A host cell transformed with an expression vector according to claim 7.

9. An isolated polypeptide comprising at least a functional portion of an amino acid sequence selected from the group consisting of sequences provided in SEQ ID NO: 120-197, 275-348, 373-398, 406-409, 413-415, 417, 456-463, 465, 488-509, 512, 513 and 624-725.

10. A fusion protein comprising at least one polypeptide according to any one of claims 1, 2 and 9.

11. An isolated antibody, or antigen-binding fragment thereof, that specifically binds to a polypeptide of any one of claims 1 and 2.

12. A composition comprising an isolated polypeptide according to any one of claims 1, 2 and 9, and at least one component selected from the group consisting of: physiologically acceptable carriers and immunostimulants.

13. A composition comprising an isolated polynucleotide according to any one of claims 3-6 and at least one component selected from the group consisting of: physiologically acceptable carriers and immunostimulants.

14. A composition comprising a fusion protein according to claim 10 and at least one component selected from the group consisting of: physiologically acceptable carriers and immunostimulants.

15. A method for treating a disorder in a patient, comprising administering to the patient a composition comprising of any one of claims 12-14.

16. The method of claim 15, wherein the disorder is selected from the group consisting of: inflammatory disorders; cancer; and neurological disorders.

17. A method for stimulating keratinocyte growth and motility in a patient, comprising administering to the patient a composition of any one of claims 12-14.

18. A method for inhibiting the growth of cancer cells in a patient, comprising administering to the patient a composition of any one of claims 12-14.

19. A method for modulating angiogenesis in a patient, comprising administering to the patient a composition of any one of claims 12-14.

20. A method for inhibiting angiogenesis and vascularization of tumors in a patient, comprising administering to a patient a composition of any one of claims 12-14.

21. A method for modulating skin inflammation in a patient, comprising administering to the patient a composition of any one of claims 12-14.

22. A method for stimulating the growth of epithelial cells in a patient, comprising administering to the patient a composition of any one of claims 12-14.

23. A method for inhibiting the binding of HIV-1 to leukocytes in a patient, comprising administering to the patient a composition of any one of claims 12-14.

24. A method for treating a disorder, comprising reducing the amount or activity of a polypeptide of any one of claims 1, 2 and 9.

25. The method of claim 24, comprising administering an antibody of claim 11.

26. The method of claim 24, comprising administering an anti-sense oligonucleotide that binds specifically to a polynucleotide of any one of claims 3-6.

27. The method of claim 24, comprising administering a small interfering RNA molecule that corresponds to a polynucleotide of any one of claims 3-6.

28. The method of claim 24, wherein the disorder is characterized by tumor growth, aberrant epithelial cell growth or aberrant smooth muscle growth.

29. The method of claim 24, wherein the disorder is selected from the group consisting of: atherosclerosis, cardiovascular disease, leiomyosarcoma, fibroids, psoriasis, Crohns disease and epithelial cancers.
